(19) United States
(12) Patent Application Publication
(10) Pub. No.: US 2018/0201937 A1
(43) Pub. Date: Jul. 19, 2018

(54) INHIBITORS OF CACNA1A/ALPHA1A SUBUNIT INTERNAL RIBOSOMAL ENTRY SITE (IRES) AND METHODS OF TREATING SPINOCEREBELLAR ATAXIA TYPE 6

(71) Applicant: THE UNIVERSITY OF CHICAGO, Chicago, IL (US)

(72) Inventors: Christopher M. Gomez, Chicago, IL (US); Yu Miyazaki, Chicago, IL (US); Xiaofei Du, Chicago, IL (US)

(21) Appl. No.: 15/743,560

(22) PCT Filed: Aug. 4, 2016
(86) PCT No.: PCT/US2016/045492

§ 371 Date: Jan. 10, 2018

Related U.S. Application Data
(60) Provisional application No. 62/200,933, filed on Aug. 4, 2015.

(51) Int. Cl. C12N 15/113; A61P 25/28; C12N 15/86

(52) U.S. Cl. CPC C12N 15/1138; A61P 25/28; C12N 2750/14171; C12N 2310/141; C12N 2750/14143; C12N 15/86

(57) ABSTRACT

The invention provides methods of treating polyglutamine diseases, e.g., spinocerebellar ataxia Type 6, in a subject, comprising administering to the subject an IRES inhibitor in an amount effective for treating the SCA6 in the subject. Also provided herein are the IRES inhibitors, and pharmaceutical compositions comprising the same.

### CROSS-REFERENCE TO RELATED APPLICATIONS

[0001] This application claims priority to U.S. Provisional Patent Application No. 62/200,933, filed Aug. 4, 2015, the invention of which is incorporated herein by reference in their entirety.

### GRANT FUNDING

[0002] This invention was made with government support under Grant No. R01NS082788 awarded by the National Institutes of Health. The government has certain rights in the invention.

### INCORPORATION BY REFERENCE OF MATERIAL SUBMITTED ELECTRONICALLY

[0003] Incorporated by reference in its entirety is a computer-readable nucleotide/amino acid sequence listing submitted concurrently herewith and identified as follows: 843,341 byte ACII (Text) file named “27373/49857A_seqlisting.txt,” created on Aug. 2, 2016.

### BACKGROUND

[0004] Spinocerebellar ataxia type 6 (SCA6), a form of spinocerebellar ataxia (SCA), is a dominantly-inherited neurodegenerative disease characterized by progressive ataxia and Purkinje cell degeneration, associated with CAG repeat expansions in the gene, CACNA1A. SCA6 is a severe neurological disorder, and one of the most common SCAs worldwide (Moseley et al., Neurology. 1998; 51(6):1666-171; Wu et al., Clin Genet. 2004; 65(3):209-14; Jayadev et al., J Neurol Sci. 2006; 250(1-2):110-3; Basri et al., J Hum Genet. 2007; 52(10):848-55; Klockgether. Cerebellum. 2008; 7(2):101-5; Wardle et al., J Neurol. 2009; 256(3):343-348), roughly as prevalent as amyotrophic lateral sclerosis (Kurtzke J F. Adv Neurol. 1982; 36:281-302; Zhuchenko et al., Nature Genetics. 1997; 15(1):62-9; Craig K, et al., Ann Neurol. 2004; 55(5):752-5).

[0005] Initially, patients with SCA6 experience problems with coordination and balance (ataxia). Other early signs and symptoms of SCA6 include speech difficulties, involuntary eye movements (nystagmus), and double vision. Over time, individuals with SCA6 may develop loss of coordination in their arms, tremors, and uncontrolled muscle tensing (dystonia). Signs and symptoms of SCA6 typically begin in a person's forties or fifties but can appear anytime from childhood to late adulthood. Most people with this disorder require wheelchair assistance by the time they are in their sixties. Patients with genetically distinct forms of SCA, including SCA6, become disabled and may progress to severe incapacitation. Many patients die prematurely due to aspiration pneumonia or respiratory failure (Perlman S L. Handb Clin Neurol. 2011; 100:113-40; Klockgether T., Curr Opin Neurol. 2011; 24(4):339-45; Marelli C, et al., Rev Neurol (Paris). 2011; 167(5):385-400). The advent of modern molecular genetics has enabled the confirmed molecular diagnosis and characterization of many distinct forms of SCA (Dun A. Lancet Neurol. 2010; 9(9):885-94). The most reliable prevalence estimates of these heterogeneous disorders are on the order of 18-50/100,000 (Craig et al., (2004), supra, Tsuji S, et al., Cerebellum. 2008; 7(2):189-97). Thus, these disorders create a substantial economic and societal burden (Lopez-Bastida et al., Mov Disord. 2008; 23(2):212-7).

[0006] Current treatment of patients with SCA6 is focused on the treatment of manifestations. For example, acetazolamide is given to patients to eliminate episodes of ataxia, while vestibular suppressants are given to reduce vertigo and/or osscilopsia. Ophthalmology consultation is provided for refractive or surgical management of diplopia. Clonazepam is given for REM sleep disorders. Home modifications are suggested for safety and convenience. Canes, walking sticks, and walkers are prescribed in order to prevent falling. Physical therapy may also be prescribed to maximize compensation and strength, while speech therapy and communication devices are given for dysarthria. Weighted eating utensils and dressing hooks are suggested, while video esophagrams are provided to identify safest behaviors and consistency of food least likely to trigger aspiration. Feeding assessment when dysphagia becomes troublesome is considered. Furthermore, weight control, as obesity exacerbates ambulation and mobility difficulties, is provided. Moreover, CPAP may be administered to patients for sleep apnea.

[0007] However, no preventive treatment exists for the numerous polyglutamine (polyQ) diseases, including SCA6, and, currently, there are no treatments that target SCA6 itself. Thus, a method of treating SCA6, rather than a method of treating SCA6 manifestations, is needed.

### SUMMARY

[0008] Presented herein are data relating to the origin and function of the α1ACT polypeptide in physiology and disease. Previously, it has been demonstrated that α1ACT is generated from the full-length α1A transcript by means of a cellular internal ribosomal entry site (IRES) located within the α1A mRNA, i.e., that the CACNA1A gene is bi-cistronic (Du et al., Cell 154:118-133 (2013). The α1ACT protein containing the normal polyQ tract is a transcription factor that binds and enhances expression of several Purkinje cell (PC)-expressed genes, promotes neurite outgrowth, and partially rescues the CACNA1A knockout phenotype. α1ACT with an expanded polyQ has altered function, reduces viability of cells in vitro, and causes gait impairment and cerebellar cortical atrophy in vivo. A truly bi-cistronic, dual-function, cellular gene encoding two proteins with completely distinct functions, in this case an ion channel and a transcription factor, was reported (Du et al. (2013), supra). This gene expression strategy demonstrates a novel role for an IRES in coordinating gene expression, as well as a potential therapeutic target for disease modifying therapy.

[0009] Provided herein are data demonstrating the selective inhibition of the expression of α1ACT encoded by the CACNA1A gene, without inhibiting the expression of α1A encoded by the same gene, upon administration of an IRES inhibitor described herein. Also provided herein are data demonstrating the inhibition of the translational initiation of CACNA1A gene-driven α1ACT by eIF4AII and EIF4GII. Further provided herein are data demonstrating the inhibition or prevention of Purkinje cell degeneration caused by CACNA1A gene-driven α1ACT_{SCA6}. Furthermore, provided herein are data demonstrating the inhibition or prevention of ataxia and motor deficits caused by CACNA1A gene-driven α1ACT_{SCA6}. Without being bound to a particular theory, these data support that administration of an IRES inhibitor described herein achieves treatment of SCA6 and other related diseases described herein.

[0010] Accordingly, the invention provides a method of treating a genetic disease in a subject. The method comprises the step of administering to the subject an IRES inhibitor in an amount effective for treating the genetic disease. In exemplary embodiments, the genetic disease is a trinucleotide repeat disorder. In exemplary embodiments, the trinucleotide repeat disorder is a polyglutamine disease. In exemplary aspects, the polyglutamine disease is spinocerebellar ataxia Type 6 (SCA6). In exemplary aspects, the IRES inhibitor of the invention are antisense molecules, as described herein. In exemplary aspects, the IRES inhibitor is a small, non-coding RNA, or an antisense nucleic acid analog thereof. In exemplary aspects, the antisense molecule is a microRNA (miRNA) or small interfering RNA (siRNA). In exemplary aspects, the antisense molecule binds to the IRES of the CACNA1A gene and, optionally, to Argonaute 4 (Ago4). In exemplary aspects, the antisense molecule binds to a portion of the IRES comprising the sequence of SEQ ID NO: 180. In exemplary aspects, the antisense molecule binds to a portion of the sequence of SEQ ID NO: 180. In exemplary aspects, the antisense molecule inhibits the expression of α1ACT encoded by the CACNA1A gene. In exemplary aspects, the antisense molecule does not inhibit expression of α1A encoded by the CACNA1A gene. In exemplary aspects, the antisense molecule selectively inhibits the expression of α1ACT encoded by the CACNA1A gene, but does not inhibit expression of α1A encoded by the CACNA1A gene. In exemplary embodiments, the IRES inhibitor is (i) an antisense molecule that binds to a portion of an IRES of a CACNA1A gene comprising the sequence of SEQ ID NO: 180, optionally, wherein the antisense molecule binds to Argonaute 4 (Ago4), (ii) a vector encoding the antisense molecule, (iii) a cell comprising the vector or antisense molecule, (iv) a extracellular vesicle comprising the antisense molecule, or (v) a combination thereof. Optionally, the vector is a recombinant expression vector of as described herein, the cell is a cell as described herein, or the extracellular vesicle is an extracellular vesicle as described herein.

[0011] Accordingly, the invention provides a method of treating spinocerebellar ataxia Type 6 (SCA6). In exemplary embodiments, the method comprises the step of administering to the subject an IRES inhibitor in an amount effective for treating the SCA6 in the subject. In exemplary embodiments, the method comprises administering to the subject (i) an antisense molecule that binds to a portion of an IRES of a CACNA1A gene comprising the sequence of SEQ ID NO: 180, optionally, wherein the antisense molecule binds to Argonaute 4 (Ago4), (ii) a vector encoding the antisense molecule, (iii) a cell comprising the vector or antisense molecule, (iv) a extracellular vesicle comprising the antisense molecule, or (v) a combination thereof. Optionally, the vector is a recombinant expression vector of as described herein, the cell is a cell as described herein, or the extracellular vesicle is an extracellular vesicle as described herein.

[0012] The invention also provides a method of treating a subject with a predisposition to spinocerebellar ataxia Type 6 (SCA6). In exemplary embodiments, the method comprises the step of administering to the subject an IRES inhibitor in amount effective for delaying development of SCA6 in the subject. In exemplary embodiments, the method comprises administering to the subject (i) an antisense molecule that binds to a portion of an IRES of a CACNA1A gene comprising the sequence of SEQ ID NO: 180, optionally, wherein the antisense molecule binds to Argonaute 4 (Ago4), (ii) a vector encoding the antisense molecule, (iii) a cell comprising the vector or antisense molecule, (iv) a extracellular vesicle comprising the antisense molecule, or (v) a combination thereof. Optionally, the vector is a recombinant expression vector of as described herein, the cell is a cell as described herein, or the extracellular vesicle is an extracellular vesicle as described herein.

[0013] IRES inhibitors, including (i) antisense molecules that bind to a portion of an IRES of a CACNA1A gene comprising the sequence of SEQ ID NO: 180, optionally, wherein the antisense molecule binds to Argonaute 4 (Ago4), (ii) a vector encoding the antisense molecule, (iii) a cell comprising the vector or antisense molecule, (iv) a extracellular vesicle comprising the antisense molecule, or (v) a combination thereof, are provided herein. Pharmaceutical compositions comprising an IRES inhibitor, including (i) antisense molecules that bind to a portion of an IRES of a CACNA1A gene comprising the sequence of SEQ ID NO: 180, optionally, wherein the antisense molecule binds to Argonaute 4 (Ago4), (ii) a vector encoding the antisense molecule, (iii) a cell comprising the vector or antisense molecule, (iv) a extracellular vesicle comprising the antisense molecule, or (v) a combination thereof, are provided herein.

### BRIEF DESCRIPTION OF THE DRAWINGS

[0014] FIG. 1 evidences that miR-3191-5p, in collaboration with Ago4, inhibits the IRES-driven translation of α1ACT_{SCA6} while sparing α1A_{SCA6} expression and α1A_{SCA6} mRNA levels in HEK293 cells. (A) miR-711, -3191-5p, and -4786-3p significantly decreased CACNA1A IRES-driven luciferase activities. (B) miR-3191-5p down-regulated α1ACT-FLAG expression but spared α1A-FLAG expression, although miR-711 and -4786-3p did both. (C) miR-3191-5p produced no significant change in α1A-Q33 mRNA levels. (D) Nucleotide sequence of the miR-3191-5p binding region of the CACNA1A IRES and mutated CACNA1A IRES (IRESmut) templates bearing C>G and G>C substitutions within the predicted miR-3191-5p binding site. (E) Dual luciferase IRESmut reporter activities were not inhibited by miR-3191-5p. (F) CACNA1A-FLAG vector with IRESmut still expressed α1ACT, which was not inhibited by miR-3191-5p. (G) miR-3191-5p did not affect the expression levels of endogenous α1A mRNA in HEK293 cells. (H, I) The knockdown of Ago4 reversed the down-regulating effects of miR-3191-5p on the CACNA1A IRES-driven luciferase activities (H) and translation of α1ACT (I). (J, K) The levels of miR-3191-5p (J) and α1A-Q33 mRNA (K) precipitated by Ago4-specific antibodies were greater than control IgG. Data are means±S.E.M. **P<0.01, ***P<0.001. n.s.: not significant; siC: siRNA control; NC: miRNA negative control.

[0015] FIG. 2 demonstrates that the complex of eIF4AII and eIF4GII directly act on CACNA1A IRES to enhance IRES-driven translation of α1ACT that is inhibited by miR-3191-5p bound to Ago4 in HEK293 cells. (A) eIF4AII and eIF4GII increased CACNA1A IRES-driven luciferase activities that were reversed by the treatment with miR-3191-5p. (B) miR-3191-5p reversed the up-regulating effects of eIF4AII and eIF4GII on α1ACT-FLAG expression. (C) eIF4AII and eIF4GII did not affect the α1A mRNA levels. (D, E) miR-3191-5p did not reverse the up-regulating effects of eIF4AII or eIF4GII on CACNA1A IRESmut-driven luciferase activities (D) and on the translation of α1ACT expressed from CACNA1A IRESmut vectors (E). (F) Immunoprecipitation from transfected HEK293 cells with vectors expressing eIF4AII and eIF4GII. (G) The knockdown of eIF4GII showed greater silencing effects on the CACNA1A IRES-driven luciferase activities than eIF4AII. (H) Both eIF4AII and eIF4GII bound to the mRNA transcribed from IRESstopmut-α1ACT vectors that were inhibited by the treatment with miR-3191-5p. Data are means±S.E.M. *P<0.05, **P<0.01, ***P<0.001. n.s.: not significant; C: control vector; AI: eIF4AI; AII: eIF4AII; GI: eIF4GI; GII: eIF4GII; IgG: control IgG; siC: siRNA control; NC: miRNA negative control; miR-C: miR-control expressing vector; miR-3191: miR-3191-5p expressing vector. Input, 10%.

[0016] FIG. 3 demonstrates the physiological and pathological effects of AAV-mediated delivery of either α1ACT_{WT} or α1ACT_{SCA6} into the WT neonatal mice. (A) The co-immunostaining using GFP-specific or FLAG-specific antibodies with staining for calbindin, a Purkinje cell marker. (B) Representative images of immunofluorescence. (C to E) Histopathological features of the cerebellum of mice injected with AAV. The molecular layer thickness (C), the density of dendritic tree (D), and the Purkinje cell count (E) (n=6). (F to H) The clinical symptoms of mice injected with AAV. The body weight (F), rotarod task (G), open field assay (H) (n=12; 6 male and 6 female mice per each group). Data are means±S.E.M. **P<0.01 and ***P<0.001. n.s.: not significant. Scale bars: (A) and (B), 100 μm.

[0017] FIG. 4 evidences the therapeutic effects of treatment with the viral administration of miR-3191-5p on the mouse phenotypes induced by AAV-mediated delivery of α1ACT_{SCA6}. (A) Representative images of immunofluorescence. (B to D) Histopathological features of the cerebellum of mice injected with AAV. The molecular layer thickness (B), the density of dendritic tree (C), and the Purkinje cell count (D) (n=6). (E to G) The clinical symptoms of mice injected with AAV. The body weight (E), rotarod task (F), open field assay (G) (n=12; 6 male and 6 female mice per each group). WT-GFP: WT-GFP mice; WT-Q33-mock: WT-Q33-miR-mock mice; WT-Q33-3191: WT-Q33-miR-3191-5p mice. Data are means±S.E.M. **P<0.01 and ***P<0.001. n.s.: not significant. Scale bars: (A), 100 μm.

[0018] FIG. 5 evidences the stem-loop structure of CACNA1A IRES and the predicted binding site of miR-711, -3191-5p, and -4′786-3p. (A) The CentroidFold program demonstrated the stem-loop structure of CACNA1A IRES. (B) The miRNA_Targets program showed the predicted binding sites of miR-711, -3191-5p, and -4′786-3p. (C) miR-711, -3191-5p, and -4786-3p target the region within CACNA1A IRES between 185 bp and 534 bp upstream from the estimated translational initiation site of α1ACT where we have previously identified an important role in the IRES-driven translation of α1ACT (9).

[0019] FIG. 6 demonstrates the preparation of a bicistronic CACNA1A IRES reporter vector. Schematic representations of a bicistronic control reporter vector (pRF) and a bicistronic CACNA1A IRES reporter vector (pRF-IRES). SV40: simian virus 40; polyA: polyadenylation signal sequence.

[0020] FIG. 7 evidences that miR-3191-5p inhibits the IRES-driven translation of α1ACT_{WT} while sparing α1A_{WT} expression and α1A_{WT} mRNA levels, while miR-711 and -4786 down-regulate α1A_{WT} protein and mRNA in HEK293 cells. (A) Western blot analysis showed that miR-3191-5p down-regulated α1ACT-Q11-FLAG expression but spared α1A-Q11-FLAG expression, although miR-711 and -4′786-3p did both. (B) miR-711 and -4′786-3p down-regulated α1A-Q11 mRNA levels by approximately half relative to a negative control. miR-3191-5p, however, produced no significant change in α1A-Q11 mRNA levels. Data are means±S.E.M. ***P<0.001. n.s.: not significant; NC: miRNA negative control.

[0021] FIG. 8 evidences the preparation of mutated CACNA1A IRES (IRESmut) templates bearing C>G and G>C substitutions within the predicted miR-3191-5p binding site. (A, B) Schematic representations of the original CACNA1A IRES (A) and mutated CACNA1A IRES (IRESmut) templates (B). C>G and G>C substitutions within the predicted miR-3191-5p binding site are shown in lowercases. We also performed C>G and G>C substitutions within the complementary binding site of the sequence targeted by miR-3191-5p, shown in lowercases, to maintain the structure of CACNA1A IRESmut same as that of the original.

[0022] FIG. 9 demonstrates that Ago4 preferentially binds to CACNA1A IRES. We also performed an immunoprecipitation-coupled qRT-PCR using a bicistronic control (pRF) or CACNA1A IRES reporter vector (pRF-IRES) in HEK293 cells. Compared to the case of pRF vector, Ago4-specific antibodies preferentially precipitated mRNA transcribed from pRF-IRES vector than control IgG. Data are means±S.E.M. **P<0.01. n.s.: not significant.

[0023] FIG. 10 demonstrates the preparation of truncated transgenes of CACNA1A second cistron that lack the sequence of 5′ up-stream from CACNA1A IRES (IRESstopmut-α1ACT). (A) Schematic representation of truncated transgenes of CACNA1A second cistron that lack the sequence of 5′ up-stream from CACNA1A IRES (IRESstopmut-α1ACT). (B) Western blot analysis showed that the IRESstopmut-α1ACT vectors expressed α1ACT-Q11-FLAG or α1ACT-Q33-FLAG but not full-length α1A-Q11-FLAG or α1A-Q33-FLAG. CACNA1A-Q11, -Q33: vectors expressing CACNA1A-encoded FLAG-tagged peptides (α1A-FLAG and α1ACT-FLAG) with 11Q, -33Q.

[0024] FIG. 11 demonstrates the widespread viral transduction throughout the brain and cerebellum of WT mice injected with AAV. (A) Schematic representation of the AAV vectors carrying the truncated transgenes of CACNA1A second cistron that lack the sequence of 5′ up-stream from CACNA1A IRES and express either α1ACT-Q11 or -Q33 tagged with a C-terminal FLAG epitope under the control of CACNA1A IRES. (B) Western blot analysis showed the strong expression of GFP, α1ACT-Q11-FLAG, or α1ACT-Q33-FLAG in the brain and cerebellum of WT mice injected with AAV. The continuous expression of GFP, α1ACT-Q11-FLAG, or α1ACT-Q33-FLAG was observed in AAV injected mice at 4 and 12 weeks of age. (C) The expression levels of α1ACT mRNA transcribed from the transgenes delivered by AAV-α1ACT-Q11 or AAV-α1ACT-Q33 into the cerebellum. ITR: inverted terminal repeats; SV40: simian virus 40; polyA: polyadenylation signal sequence; WT-GFP: WT-GFP mice; WT-α1ACT-Q11: WT-α1ACT-Q11 mice; WT-α1ACT-Q33: WT-α1ACT-Q33 mice. Data are means±S.E.M. n.s.: not significant.

[0025] FIG. 12 demonstrates the video-assisted computerized treadmill for the gait analysis of WT mice injected with AAV. (A to F) The Digigait assay revealed that WT-α1ACT-Q33 mice exhibited shorter stride length (A, C, E) and greater stride frequencies (B, D, F) compared to WT-GFP mice and WT-α1ACT-Q11 mice from 4 weeks old (n=12; 6 male and 6 female mice per each group). GFP: WT-GFP mice; Q11: WT-α1ACT-Q11 mice; Q33: WT-α1ACT-Q33 mice; L fore: Left forelimb; R fore: Right forelimb; L hind: Left hindlimb; R hind: Right hindlimb. Data are means±S.E.M. **P<0.01.

[0026] FIG. 13 evidences the widespread viral transduction throughout the brain and cerebellum of WT mice injected with AAV. (A) Western blot analysis revealed the persistent expression of α1ACT-Q33-FLAG or GFP in the brain and cerebellum of WT mice co-injected with AAV-α1ACT-Q33 and either AAV-miR-mock or AAV-miR-3191-5p, or injected with AAV-GFP for at least 12 weeks. We found the significantly decreased levels of α1ACT-Q33-FLAG expression in the brain and cerebellum of WT-Q33-miR-3191-5p mice as compared to WT-Q33-miR-mock mice. (B) qRT-PCR studies of total RNA showed that the α1ACT-Q33 mRNA levels in the cerebellum of WT-Q33-miR-3191-5p mice were comparable with those of WT-Q33-miR-mock mice. WT-GFP: WT-GFP mice; WT-Q33-mock: WT-Q33-miR-mock mice; WT-Q33-3191: WT-Q33-miR-3191-5p mice. Data are means±S.E.M. n.s.: not significant.

[0027] FIG. 14 demonstrates the video-assisted computerized treadmill for the gait analysis of mice injected with AAV. (A to F) The Digigait assay revealed that the treatment with AAV-miR-3191-5p ameliorated the disease phenotypes of shorter stride length (A, C, E) and greater stride frequencies (B, D, F) in WT-Q33-miR-3191-5p mice. GFP: WT-GFP mice; Q33-mock: WT-Q33-miR-mock mice; Q33-3191: WT-Q33-miR-3191-5p mice; L fore: Left forelimb; R fore: Right forelimb; L hind: Left hindlimb; R hind: Right hindlimb. (n=12; 6 male and 6 female mice per each group). Data are means±S.E.M. **P<0.01.

[0028] FIG. 15 demonstrates a histopathological examination of the brain, cerebellum, heart, lung, liver, and kidney of WT mice treated with AAV-miR-3191-5p. (A to F) Histopathological examination revealed that no obvious morphological anomalies in the brain (A), cerebellum (B), heart (C), lung (D), liver (E), and kidney (F) of the 12 week-old WT mice injected with AAV-miR-3191-5p (WT-miR-3191-5p) compared to age-matched WT mice (WT). Scale bars: (A), 500 μm; and (B) to (F), 200 μm.

[0029] FIG. 16 provides data demonstrating that somatic gene transfer of CACNA1A IRES-driven α1ACTSCA6 causes Purkinje cell degeneration in mice. (A) Representative immunofluorescence images of AAV9-injected mouse brain and cerebellum from 4-week-old mice stained with FLAG-specific antibodies and fluorescent secondary antibody. Scale bar, 5 mm. (B) Relative α1ACT-FLAG immunofluorescence intensities in AAV9-injected mouse hippocampus, cerebral cortex, and cerebellum (n=6). Relative α1ACT-FLAG immunofluorescence is expressed as signal intensities per unit area quantified by the National Institutes of Health (NIH) ImageJ software. n.s., not significant. (C) Relative α1ACT mRNA expression in the cerebellum of AAV9-injected mice at 4 weeks of age (n=4). (D) Western blot and densitometric analyses showing α1ACT-Q11-FLAG and α1ACT-Q33-FLAG expression in the cerebellum of AAV9-injected mice at 4 weeks of age (n=4). (E) Representative immunofluorescence images of AAV9-injected mouse cerebellum from 4-week-old mice stained with calbindin-specific antibodies and fluorescent secondary antibody. Scale bar, 100 μm. (F to H) Molecular layer thickness (F), density of dendritic tree (G), and Purkinje cell count of AAV9-injected mouse cerebellum from 4-week-old mice (n=6) (H). GFP, AAV9-GFP mice; Q11, AAV9-α1ACT-Q11 mice; Q33, AAV9-α1ACT-Q33 mice. All data represent means±SEM. **P<0.01. Student's t test in (B) to (D). One-way analysis of variance (ANOVA) in (F) to (H).

[0030] FIG. 17 provides data demonstrating that CACNA1A IRES-driven α1ACTSCA6 causes an early-onset ataxia and motor deficits in mice. (A to E) Clinical features of AAV9-injected mice. Body weight (A), rotarod test (B), and open-field assay (C) at 4 weeks of age. Stride length (D) and stride frequencies (E) assessed by DigiGait analysis at 4 weeks of age (n=12, 6 male and 6 female mice per group). GFP, AAV9-GFP mice; Q11, AAV9-α1ACT-Q11 mice; Q33, AAV9-α1ACT-Q33 mice. All data represent means±SEM. *P<0.05, **P<0.01. Two-way ANOVA in (A) and (B). One-way ANOVA in (C) to (E).

[0031] FIG. 18 provides data demonstrating that miR-3191-5p inhibits the CACNA1A IRES-driven translation of α1ACT while sparing α1A and CACNA1A mRNA expression in HEK293 cells. (A) Schematic representation of a bicistronic control reporter vector and a bicistronic CACNA1A IRES reporter vector. SV40, simian virus 40; polyA, polyadenylation signal sequence. (B) Relative dual-luciferase CACNA1A IRES reporter activities in HEK293 cells treated with miR-711, miR-3191-5p, miR-4786-3p, or an miRNA negative control (NC) (n=6). The ratio of firefly luciferase to Renilla luciferase activities of a bicistronic CACNA1A IRES reporter vector was normalized to that of a bicistronic control reporter vector. (C and D) Western blot and densitometric analyses showing α1A-FLAG and α1ACT-FLAG expression in HEK293 cells treated with three miRNAs or NC (n=6). (C)CACNA1A-Q11. (D) CACNA1A-Q33. GAPDH, glyceraldehyde-3-phosphate dehydrogenase. (E and F) Relative CACNA1A-Q11 (E) and CACNA1A-Q33 (F) mRNA expression in HEK293 cells treated with three miRNAs or NC (n=6). (G) Relative endogenous CACNA1A mRNA expression in HEK293 cells treated with miR-3191-5p or NC (n=6). All data represent means±SEM. **P<0.01, ***P<0.001. Student's t test in (B) to (G).

[0032] FIG. 19 provides data demonstrating that Ago4 is required for miR-3191-5p-mediated inhibition of CACNA1A IRES-driven α1ACT translation. (A) Relative dual-luciferase CACNA1A IRES reporter activities in HEK293 cells treated with si-Ago1, si-Ago2, si-Ago3, si-Ago4, or a scrambled control siRNA (si-C) in the presence of miR-3191-5p or an miRNA NC (n=6). The ratio of firefly luciferase to Renilla luciferase activities of a bicistronic CACNA1A IRES reporter vector was normalized to that of a bicistronic control reporter vector. (B) Western blot and densitometric analyses showing α1A-Q33-FLAG and α1ACT-Q33-FLAG expression in HEK293 cells treated with four siRNAs or si-C in the presence of miR-3191-5p or NC (n=6). (C and D) Amount of miR-3191-5p (C) and CACNA1A-Q33 (D) mRNA binding to Ago1 to Ago4 that was immunoprecipitated using antibodies against Ago1 to Ago4 or a control immunoglobulin G (IgG) (n=6). (E) Relative amount of endogenous miR-3191-5p in HEK293 cells treated with si-Ago4 or si-C (n=6). All data represent means±SEM. **P<0.01, ***P<0.001. Student's t test in (A) to (E).

[0033] FIG. 20 provides data demonstrating that miR-3191-5p inhibits the translational initiation of CACNA1A IRES-driven α1ACT by eIF4AII and eIF4GII. (A to D) Relative dual-luciferase CACNA1A IRES reporter activities in HEK293 cells treated by overexpression of either eIF4AI (AI) (A), eIF4AII (AII) (B), eIF4GI (GI) (C), eIF4GII (GII) (D), or a control vector (C) in the presence of miR-3191-5p or an miRNA NC (n=6). The ratio of firefly luciferase to Renilla luciferase activities of a bicistronic CACNA1A IRES reporter vector was normalized to that of a bicistronic control reporter vector. (E and F) Western blot and densitometric analyses showing α1A-Q33-FLAG and α1ACT-Q33-FLAG expression in HEK293 cells treated by overexpression of either AII (E), GII (F), or C in the presence of miR-3191-5p or NC (n=6). (G and H) Relative CACNA1A-Q33 mRNA expression in HEK293 cells treated by overexpression of either AII (G), GII (H), or C in the presence of miR-3191-5p or NC (n=6). (I and J) Amount of IRES-α1ACT-Q33 mRNA binding to AII (I), GII (J), or a control IgG in the presence of vectors expressing miR-3191-5p (miR-3191) or an miRNA control (miR-C) that was immunoprecipitated using antibodies against AII, GII, or a control IgG (n=6). (K) Immunoprecipitation (IP) from HEK293 cells transfected with AII- and GII-expressing vectors using an antibody against AII, GII, or a control IgG. Recovered proteins were analyzed using Western blot. Input, 10%. (L) Relative dual-luciferase CACNA1A IRES reporter activities in HEK293 cells treated with si-AII, si-GII, or a scrambled si-C (n=6). The ratio of firefly luciferase to Renilla luciferase activities of a bicistronic CACNA1A IRES reporter vector was normalized to that of a bicistronic control reporter vector. All data represent means±SEM. *P<0.05, **P<0.01, ***P<0.001. Student's t test in (A) to (F), (I), (J), and (L). One-way ANOVA in (G) and (H).

[0034] FIG. 21 provides data demonstrating that AAV9-mediated therapeutic delivery of miR-3191-5p blocks CACNA1A RES-driven α1ACT translation in mice. (A and B) Representative immunofluorescence images of AAV9-injected mouse brain and cerebellum from 4-week-old mice stained with GFP-specific (A) and FLAG-specific (B) antibodies and fluorescent secondary antibody. Scale bar, 5 mm. (C and D) Relative GFP (C) and α1ACT-FLAG (D) immunofluorescence intensities in AAV9-injected mouse hippocampus, cerebral cortex, and cerebellum (n=6). Relative GFP and relative FLAG immunofluorescence are expressed as signal intensities per unit area quantified by NIH ImageJ software. (E) Relative α1ACT mRNA expression in the cerebellum of AAV9-injected mice at 4 weeks of age (n=4). (F) Western blot and densitometric analyses showing α1ACT-Q33-FLAG expression in the cerebellum of AAV9-injected mice at 4 weeks of age (n=4). (G and H) Amount of miR-3191-5p (G) and α1ACT-Q33 (H) mRNA binding to Ago4 that was immunoprecipitated using an antibody against Ago4 or a control IgG in the cerebellum of AAV9-Q33-miR-3191-5p mice at 4 weeks of age (n=6). GFP, AAV9-GFP mice; mock, AAV9-Q33-miR-mock mice; 3191, AAV9-Q33-miR-3191-5p mice. All data represent means±SEM. **P<0.01. One-way ANOVA in (C). Student's t test in (D) to (H).

[0035] FIG. 22 provides data demonstrating that miR-3191-5p prevents Purkinje cell degeneration caused by CACNA1A RES-driven α1ACTSCA6 in mice. (A) Representative immunofluorescence images of AAV9-injected mouse cerebellum from 4-week-old mice stained with calbindin-specific antibodies and fluorescent secondary antibody. Scale bar, 100 μm. (B to D) Molecular layer thickness (B), density of dendritic tree (C), and Purkinje cell counts (D) in AAV9-injected mouse cerebellum from 4-week-old mice (n=6). GFP, AAV9-GFP mice; mock, AAV9-Q33-miR-mock mice; 3191, AAV9-Q33-miR-3191-5p mice. All data represent means±SEM. **P<0.01. Student's t test in (B) to (D).

[0036] FIG. 23 provides data demonstrating that AAV9-miR-3191-5p prevents the ataxia and motor deficits caused by CACNA1A RES-driven α1ACTSCA6 in mice. (A to E) Clinical features of AAV9-injected mice. Body weight (A), rotarod test (B), and open-field assay (C) at 4 weeks of age. Stride length (D) and stride frequencies (E) assessed by DigiGait analysis at 4 weeks of age (n=12, 6 male and 6 female mice per group). GFP, AAV9-GFP mice; mock, AAV9-Q33-miR-mock mice; 3191, AAV9-Q33-miR-3191-5p mice. All data represent means±SEM. *P<0.05, **P<0.01. Two-way ANOVA in (A) and (B). Student's t test in (C) to (E).

[0037] FIG. 24 is a schematic representation of AAV9 vectors and AAV9 transduction efficiency into Purkinje cells. (A) Schematic representation of truncated transgenes of CACNA1A second cistron that lack the sequence of 5′ upstream from CACNA1A IRES (IRES-α1ACT). The sequence of nt 4962 to 7757 of full-length CACNA1A cDNA (NM_001127222.1) corresponds to that of CACNA1A IRES and α1ACT open reading frame. The sequence of nt 5013 to 5015 is modified from “TAT” to “TAG” of stop codon. (B) Schematic representations of the AAV9 vectors expressing either CACNA1A IRES-driven α1ACT-Q11 or CACNA1A IRES-driven α1ACT-Q33 tagged with a C-terminal FLAG epitope. ITR: inverted terminal repeats; WPRE: woodchuck hepatitis virus posttranscriptional regulatory element; SV40: simian virus 40; polyA: polyadenylation signal sequence. (C) Representative immunofluorescence images of AAV9-GFP-injected mouse cerebellum from 4-week-old mice co-stained with calbindin-specific and GFP-specific antibodies and fluorescent secondary antibody (scale bars: 100 μm). Phosphate saline buffer (PBS)-injected mice were used as controls. (D) Purkinje cell count of AAV9-injected mouse cerebellum relative to PBS-injected mouse cerebellum (n=6). 75.4±8.9% of calbindin positive cells were positive for GFP staining in the cerebellum of AAV9-GFP mice. Calbindin (+): calbindin positive cells. GFP (+): GFP positive cells.

[0038] FIG. 25 provides data demonstrating a histopathological examination of the AAV9-injected mouse cerebral cortex and hippocampus. (A, B) Representative images of (A) cerebral cortex and (B) hippocampus of AAV9-GFP mice, AAV9-α1ACT-Q11mice, and AAV9-α1ACT-Q33 mice stained with Hematoxylin and eosin. Scale bars: 500 μm in (A) and (B).

[0039] FIG. 26 The long-term follow-up of AAV9-injected mouse behavioral phenotypes and CACNA1A IRES-driven α1ACT expression in mice. (A to F) Clinical features of AAV9-injected mice. (A) Rotarod test and (B) open field assay, (C) stride length and (D) stride frequencies assessed by Digigait analysis at 12 weeks of age. (E) Rotarod test and (F) open field assay at 30 weeks of age (n=12:6 male and 6 female mice per each group). (G) Western blot and densitometric analyses showing α1ACT-FLAG expression in the cerebellum of AAV9-injected mice at 30 weeks of age (n=4). GFP: AAV9-GFP mice; Q11: AAV9-α1ACT-Q11 mice; Q33: AAV9-α1ACT-Q33 mice. All data represent mean±SEM. *P<0.05, **P<0.01. Two-way ANOVA in (A) and (E). One-way ANOVA in (B) to (D), and (F). Student's t-test in (G).

[0040] FIG. 27 demonstrates the stem-loop structure of CACNA1A IRES and the predicted binding sites of miR-711, miR-3191-5p, and miR-4786-3p. (A) Secondary structure of stem-loop of CACNA1A IRES calculated by the CentroidFold. (B to D) The nucleotide sequence of binding sites of (B) miR-711, (C) miR-3191-5p, and (D) miR-4786-3p within CACNA1A IRES predicted by the miRNA_Targets program.

[0041] FIG. 28 provides data demonstrating the effects of miR-3191-5p on mutated CACNA1A IRES templates. (A, B) Schematic representations of (A) the original CACNA1A IRES and (B) mutated CACNA1A IRES (CACNA1A IRESmut) templates. C>G and G>C substitutions within the predicted miR-3191-5p binding site are shown in lowercase. We also performed C>G and G>C substitutions within the complementary binding site of the sequence targeted by miR-3191-5p, also shown in lowercase, to maintain the stem-loop structure of CACNA1A IRESmut as same as that of the original. (C) Nucleotide sequence of the miR-3191-5p binding site within CACNA1A IRES and CACNA1A IRESmut templates. (D) Relative dual luciferase CACNA1A IRESmut reporter activities in HEK293 cells treated with miR-3191-5p or a miRNA negative control (NC) (n=6). The ratio of firefly luciferase to Renilla luciferase activities of a bicistronic CACNA1A IRESmut reporter vector was normalized to that of a bicistronic control reporter vector. (E) Western blot and densitometric analyses showing α1A-Q33-FLAG and α1ACT-Q33-FLAG expression from CACNA1A IRESmut vectors in HEK293 cells treated with miR-3191-5p or NC (n=6). All data represent mean±SEM. n.s.: not significant. Student's t-test in (D) and (E).

[0042] FIG. 29 provides data demonstrating the effects of eIF4AII and eIF4GII on mutated CACNA1A IRES templates in the presence or absence of miR-3191-5p. (A, B) Relative dual luciferase CACNA1A IRESmut reporter activities in HEK293 cells treated with over-expression of either (A) eIF4AII (AII), (B) eIF4GII (GII), or a control vector (C) in the presence of miR-3191-5p or a miRNA negative control (NC) (n=6). The ratio of firefly luciferase to Renilla luciferase activities of a bicistronic CACNA1A IRESmut reporter vector was normalized to that of abicistronic control reporter vector. (C, D) Western blot and densitometric analyses showing α1A-Q33-FLAG and α1ACT-Q33-FLAG expression from CACNA1A IRESmut vectors in HEK293 cells treated with over-expression of either (C) AII, (D) GII, or C in the presence of miR-3191-5p or NC (n=6). (E) Schematic diagram of the effect of eIF4AII and eIF4GII on CACNA1A IRES-driven α1ACT translation. The complex of eIF4AII and eIF4GII directly acts on CACNA1A IRES to enhance the initiation of IRES-driven α1ACT translation. (F) Schematic diagram of the inhibitory effect of miR-3191-5p bound to Ago4. miR-3191-5p, in collaboration with Ago4, binds to CACNA1A IRES to inhibit the interaction between CACNA1A IRES and the complex of eIF4AII and eIF4GII. All data represent mean±SEM. **P<0.01, ***P<0.001. n.s.:not significant. Student's t-test in (A) to (D).

[0043] FIG. 30 provides data demonstrating cotransduction of AAV9-α1ACT-Q33 with either AAV9-miR-mock or AAV9-miR-3191-5p. (A) Schematic representations of the AAV9 vectors expressing GFP with either miR-3191-5p or a scrambled miR (miR-mock). ITR: inverted terminal repats; WPRE: woodchuck hepatitis virus posttranscriptional regulatory element; SV40: simian virus 40; polyA: polyadenylation signal sequence. (B) Representative immunofluorescence images of AAV9-injected mouse cerebellum from 4-week-old mice stained with GFP- and FLAG-specific antibodies and fluorescent secondary antibody (scale bars: 100 μm). (C) The ratio of Purkinje cells stained with both FLAG- and GFP-specific antibodies (both FLAG and GFP positive cells) to those with FLAG-specific antibody (FLAG positive cells). FLAG positive cells were transduced with AAV9-α1ACT-Q33. GFP positive cells were transduced with either AAV9-miR-mock or AAV9-miR-3191-5p (n=6). AAV9-GFP: AAV9-GFP mice; AAV9-Q33-miRmock: AAV9-Q33-miR-mock mice; AAV9-Q33-miR-3191-5p: AAV9-Q33-miR-3191-5p mice. All data represent mean±SEM. n.s.: not significant. Student's t-test in (C).

[0044] FIG. 31 demonstrates the long-term follow-up of therapeutic effect of miR-3191-5p on mouse behavioral phenotypes and CACNA1A IRES-driven α1ACTSCA6 expression in mice. (A to F) Clinical features of AAV9-injected mice. (A) Rotarod test and (B) open field assay, (C) stride length and (D) stride frequencies assessed by Digigait analysis at 12 weeks of age. (E) Rotarod test and (F) open field assay at 30 weeks of age (n=12:6 male and 6 female mice per each group). (G) Western blot and densitometric analyses showing α1ACT-Q33-FLAG expression in the cerebellum of AAV9-injected mice at 30 weeks of age (n=4). GFP: AAV9-GFP mice; mock: AAV9-Q33-miR-mock mice; 3191: AAV9-Q33-miR-3191-5p mice. All data represent mean±SEM. *P<0.05, **P<0.01. Two-way ANOVA in (A) and (E). Student's t-test in (B) to (D), (F), and (G).

[0045] FIG. 32 demonstrates the potential mouse mRNAs targeted by human miR-3191-5p. (A) The list of 13 human genes of which 3′UTR has binding sites targeted by hsa-miR-3191-5p predicted by the TargetScanHuman 7.0 (http://www.targetscan.org/vert_70/). Among these, 7 genes (PRX, ZNF781, C22orf46, ZNF23, ZNF286A, ERBB4, PTBP1) have hsa-miR-3191-5p binding sites within 3′UTR of their conserved mouse orthologs. (B to H) Relative expression of the mouse (B) Prx, (C) Zfp781, (D) 4930407I10Rik, (E) Zfp612, (F) Zfp286, (G) Erbb4, and (H) Ptbp1 mRNAs in the cerebellum of AAV9-injected mice (n=4). N/A: not assigned; WT, mock: wildtype mice injected with AAV9-miR-mock; WT, 3191: wild-type mice injected with AAV9-miR-3191-5p. All data represent mean±SEM. *P<0.05. n.s.: not significant. Student's t-test in (B) to (H).

[0046] FIG. 33 demonstrates a histopathological examination of the brain, cerebellum, heart, lung, liver, and kidney of wild-type mice injected with AAV9-miR-3191-5p. (A to F) Histopathological examination of the (A) brain, (B) cerebellum, (C) heart, (D) lung, (E) liver, and (F) kidney of the 12-week-old wild-type mice injected with AAV-miR3191-5p (WT-miR-3191-5p) compared to age-matched wild-type mice (WT). All were stained with Hematoxylin and eosin. Scale bars: (A), 500 μm; and (B) to (F), 200 μm.

### DETAILED DESCRIPTION

[0047] Spinocerebellar Ataxia Type 6 (SCA6)

[0048] SCA6 is a neurodegenerative disease (polyQ disorders) caused by expansion of a polyglutamine (polyQ) tract. In SCA6, the polyQ tract expansion is encoded by the 47^{th} exon of the CACNA1A gene. In exemplary aspects, the normal range of polyQ tracts is 4-18, whereas the pathological range of polyQ tracts is 19-33.

[0049] The principal gene product of CACNA1A is the α1A subunit of the P/Q-type voltage-gated Ca²⁺ channel. Voltage-gated calcium channel genes encode a large family of channel proteins (al subunits) that play critical roles in neuronal excitability, transmitter release, muscle contractility and gene expression (Catterall, Cold Spring Harbor Perspect. Biol. 3, a003947 (2011)). Genetic defects of these channels have been implicated in a variety of neurological, cardiac and skeletal muscle disorders (Cain and Snutch, Biofactors 37: 197-205 (2011)). Diverse mutations in the α1A subunit, CACNA1A gene, causing either loss or gain of P/Q-type channel function, have been associated with dominantly inherited conditions of migraine, epilepsy, and episodic and progressive ataxia (Rajakulendran et al., Nat. Rev. Neurol. 8: 86-96 (2012)). CACNA1A mutations of several types, leading to both loss and gain of channel function, are responsible for several types of neurological diseases, including episodic ataxia type 2, familial hemiplegic migraine, and epilepsy (Jen J, et al., Neurology. 2004; 62:17-22; Spacey S D, Materek L A, Szczygielski B I, Bird T D. 2005; 62(2):314-6; Roubertie A, et al., J Neurol. 2008; 255(10):1600-2).

[0050] The presence of the CAG repeat encoding a polyQ tract in the C terminus of the α1A subunit led to the obvious hypothesis that the polyQ expansion in SCA6 caused a pathological disturbance of P/Q channel function (Kordasiewicz H B, et al., 2007; 4(2):285-94; Lory P, et al., IDrugs. 2010; 13(7):467-71). However, several in vitro and in vivo expression studies have failed to demonstrate a consistent effect on channel function (Matsuyama Z, et al., J. Neurosci. 1999; RC14:1-5; Restituito S, et al., J. Neurosci. 2000; 20(17):6394-403; Toru S, et al., Journal of Biological Chemistry. 2000; 275(15):10893-8; Piedras-Renteria E S, et al., J Neurosci. 2001; 21(23):9185-93; Chen H, Piedras-Renteria E S. 2007; 292(3):C1078-86). In particular, two separate studies using CACNA1A knock-in mice with SCA6 repeat expansions failed to demonstrate any change in P/Q channel gating properties in cerebellar neurons (Saegusa H, et al., Mol Cell Neurosci. 2007; 34(2):261-70; Watase K, et al., Proc Natl Acad Sci USA. 2008; 105(33):11987-92). Therefore, it is unlikely that SCA6 is a “channelopathy” in the classical sense. That SCA6 was attributed to expansion of polyQ tracts added further complexity to modeling both channel function and disease pathogenesis (Zhuchenko et al., Nat. Genet. 15:62-69 (1997)).

[0051] Evidence provided herein suggests that the disease is attributable to expression of a polyQ repeat expansion within a second CACNA1A gene product, α1ACT, that normally serves as a transcription factor (TF) critical for cerebellar cortical development. α1ACT is a C-terminal peptide encoded by the α1A mRNA. SCA6-sized polyQ expansions in the α1ACT TF interrupt its cellular and molecular function, and several studies have shown toxicity of α1ACT with SCA6-sized polyQ expansions in models. Several laboratories have shown that α1ACT, which contains the polyQ tract, is present as a stable fragment in cultured cells or cerebellar tissues (Scott V E, et al., J Neurosci. 1998; 18(2):641-7; Kubodera et al. Neurosci Lett. 2003; 341(1):74-8; Kordasiewicz et al., Hum Mol Genet. 2006; 15(10):1587-99; Marqueze-Pouey et al., Traffic. 2008; 9(7):1088-100; Ishiguro et al., Acta Neuropathol. 2010; 119(4):447-64). This fragment is enriched in cerebellar nuclei, translocated based on nuclear localization signals in the α1ACT sequence (Kordasiewicz et al., supra). Finally, several groups have shown that the α1ACT fragment bearing SCA6-expanded polyQs, unlike the full-length α1A subunit, is toxic to cultured cells or primary neurons (Kubodera et al. Neurosci Lett. 2003; 341(1):74-8; Kordasiewicz et al., Hum Mol Genet. 2006; 15(10):1587-99; Marqueze-Pouey et al., Traffic. 2008; 9(7):1088-100; Ishiguro et al., Acta Neuropathol. 2010; 119(4):447-64).

[0052] As shown herein, α1ACT arises from a gene regulatory mechanism, that is novel for the CACNA1A gene and for ion channel genes in general, in which expression of α1ACT is under the control of a cryptic cellular internal ribosomal entry site (IRES) within the CACNA1A gene coding region. Based on the data herein, it is hypothesized that the cellular IRES-regulated α1ACT is required for Purkinje cell development, and that the polyQ-expanded variant, α1ACT_{SCA6}, leads to neurodegeneration.

[0053] Based at least in part on the data presented herein, the invention provides a method of treating SCA6 in a subject in need thereof. In exemplary embodiments, the method comprises the step of administering to the subject an IRES inhibitor in an amount effective for treating the SCA6 in the subject.

[0054] The invention also provides a method of treating a subject with a predisposition to spinocerebellar ataxia Type 6 (SCA6). In exemplary embodiments, the method comprises the step of administering to the subject an IRES inhibitor in amount effective for delaying development of SCA6 in the subject. In exemplary aspects, the subject with a predisposition to SCA6 is a subject who has a family history of SCA6. In exemplary aspects, the subject with a predisposition to SCA6 is a subject who has a parent suffering from SCA6. In exemplary aspects, the subject with a predisposition to SCA6 is a subject who has one copy of the altered CACNA1A gene having a number of polyQ tracts in the pathological range. In exemplary aspects, the subject is one who has a number of polyQ tracts in the 47^{th} exon of the CACNA1A gene which is considered pathological (e.g., 19 or more polyQ tracts).

[0055] In exemplary aspects, the subject is a subject who has more than 10 (e.g., more than 11, 12, 13, 14, 15, 16, 17, 18) polyQ tracts in the 47^{th} exon of the CACNA1A gene. In exemplary aspects, the subject is a subject who has more than 15 (e.g., 16, 17, 18) polyQ tracts in the 47^{th} exon of the CACNA1A gene.

[0056] In exemplary aspects, the method of treating a subject with SCA6 or a predisposition to SCA6 comprises administering to the subject (i) an antisense molecule that binds to a portion of an IRES of a CACNA1A gene comprising the sequence of SEQ ID NO: 180, optionally, wherein the antisense molecule binds to Argonaute 4 (Ago4), (ii) a vector encoding the antisense molecule, (iii) a cell comprising the vector or antisense molecule, (iv) a extracellular vesicle comprising the antisense molecule, or (v) a combination thereof. Optionally, the vector is a recombinant expression vector of as described herein, the cell is a cell as described herein, or the extracellular vesicle is an extracellular vesicle as described herein. In exemplary aspects, the antisense molecule comprises the sequence of SEQ ID NO: 179. In exemplary aspects, the vector is a recombinant adeno-associated viral (AAV) vector, e.g., an AAV serotype 9 (AAV9) vector. In exemplary aspects, the recombinant AAV vector comprises one or more of a promoter, a pair of inverted terminal repeats (ITRs), and a polyadenylation signal sequence. In exemplary aspects, the promoter is a human cytomegalovirus (CMV) immediate early promoter. In exemplary aspects, the ITRs are AAV ITRs. In exemplary aspects, the polyadenylation signal sequence is an simian virus 40 (SV40) polyadenylation signal sequence. In exemplary aspects, the recombinant expression vector comprises a woodchuck hepatitis virus posttranscriptional regulatory element (WPRE). In exemplary aspects, the recombinant expression vector comprises an ITR upstream of the human CMV immediate early promoter, which is located upstream of the nucleotide sequence encoding the antisense molecule, which is located upstream of the WPRE which is located upstream of the SV40 polyadenylation signal sequence which is located upstream of the other ITR.

[0057] The term “treat” as well as words stemming therefrom, as used herein, do not necessarily imply 100% or complete treatment. Rather, there are varying degrees of treatment of which one of ordinary skill in the art recognizes as having a potential benefit or therapeutic effect. In this respect, the inventive methods can provide any amount, level, or degree of treatment in a subject. Furthermore, the treatment provided by the methods of the invention may include treatment of one or more conditions or symptoms or signs of the genetic disease, trinucleotide repeat disorder, polyQ disease, or SCA6 being treated. For example, the method of the invention may address one or more of: episodes of ataxia, vertigo and/or osscilopsia, diplopia, REM sleep disorders, dysarthria, dysphagia, ambulation and mobility difficulties, sleep apnea, ataxia, speech difficulties, involuntary eye movements (nystagmus), double vision, loss of coordination in their arms, tremors, uncontrolled muscle tensing (dystonia), severe incapacitation, aspiration pneumonia or respiratory failure. Also, the treatment provided by the methods of the invention may encompass slowing the progression of the disease or disorder. For example, the treatment may slow the progression of one or more of: episodes of ataxia, vertigo and/or osscilopsia, diplopia, REM sleep disorders, dysarthria, dysphagia, ambulation and mobility difficulties, sleep apnea, ataxia, speech difficulties, involuntary eye movements (nystagmus), double vision, loss of coordination in their arms, tremors, uncontrolled muscle tensing (dystonia), severe incapacitation, aspiration pneumonia or respiratory failure.

[0058] Accordingly, the invention provides methods of inhibiting or preventing Purkinje cell degeneration in a subject. The invention also accordingly provides methods of inhibiting or preventing ataxia in a subject. In exemplary embodiments, the methods comprise administering to the subject (i) an antisense molecule that binds to a portion of an IRES of a CACNA1A gene comprising the sequence of SEQ ID NO: 180, optionally, wherein the antisense molecule binds to Argonaute 4 (Ago4), (ii) a vector encoding the antisense molecule, (iii) a cell comprising the vector or antisense molecule, (iv) a extracellular vesicle comprising the antisense molecule, or (v) a combination thereof. Optionally, the vector is a recombinant expression vector of as described herein, the cell is a cell as described herein, or the extracellular vesicle is an extracellular vesicle as described herein. In exemplary aspects, the antisense molecule comprises the sequence of SEQ ID NO: 179. In exemplary aspects, the vector is a recombinant adeno-associated viral (AAV) vector, e.g., an AAV serotype 9 (AAV9) vector. In exemplary aspects, the recombinant AAV vector comprises one or more of a promoter, a pair of inverted terminal repeats (ITRs), and a polyadenylation signal sequence. In exemplary aspects, the promoter is a human cytomegalovirus (CMV) immediate early promoter. In exemplary aspects, the ITRs are AAV ITRs. In exemplary aspects, the polyadenylation signal sequence is an simian virus 40 (SV40) polyadenylation signal sequence. In exemplary aspects, the recombinant expression vector comprises a woodchuck hepatitis virus posttranscriptional regulatory element (WPRE). In exemplary aspects, the recombinant expression vector comprises an ITR upstream of the human CMV immediate early promoter, which is located upstream of the nucleotide sequence encoding the antisense molecule, which is located upstream of the WPRE which is located upstream of the SV40 polyadenylation signal sequence which is located upstream of the other ITR.

[0059] Polyglutamine (PolyQ) Diseases

[0060] Because SCA6 is a polyQ disease, the steps of the methods of treating SCA6 provided herein are proposed as being useful in the treatment of other polyQ diseases. Accordingly, the invention provides methods of treating a polyglutamine (PolyQ) disease in a subject in need thereof. In exemplary embodiments, the methods comprise the step of administering to the subject an IRES inhibitor in an amount effective for treating the polyQ disease in the subject. In exemplary embodiments, the methods comprise administering to the subject (i) an antisense molecule that binds to a portion of an IRES of a CACNA1A gene comprising the sequence of SEQ ID NO: 180, optionally, wherein the antisense molecule binds to Argonaute 4 (Ago4), (ii) a vector encoding the antisense molecule, (iii) a cell comprising the vector or antisense molecule, (iv) a extracellular vesicle comprising the antisense molecule, or (v) a combination thereof. Optionally, the vector is a recombinant expression vector of as described herein, the cell is a cell as described herein, or the extracellular vesicle is an extracellular vesicle as described herein. In exemplary aspects, the antisense molecule comprises the sequence of SEQ ID NO: 179. In exemplary aspects, the vector is a recombinant adeno-associated viral (AAV) vector, e.g., an AAV serotype 9 (AAV9) vector. In exemplary aspects, the recombinant AAV vector comprises one or more of a promoter, a pair of inverted terminal repeats (ITRs), and a polyadenylation signal sequence. In exemplary aspects, the promoter is a human cytomegalovirus (CMV) immediate early promoter. In exemplary aspects, the ITRs are AAV ITRs. In exemplary aspects, the polyadenylation signal sequence is an simian virus 40 (SV40) polyadenylation signal sequence. In exemplary aspects, the recombinant expression vector comprises a woodchuck hepatitis virus posttranscriptional regulatory element (WPRE). In exemplary aspects, the recombinant expression vector comprises an ITR upstream of the human CMV immediate early promoter, which is located upstream of the nucleotide sequence encoding the antisense molecule, which is located upstream of the WPRE which is located upstream of the SV40 polyadenylation signal sequence which is located upstream of the other ITR.

[0061] As used herein, the term “polyQ disease” refers to a trinucleotide repeat disorder in which the codon CAG is repeated in the coding region of a gene resulting in a polyQ tract beyond a normal or standard. PolyQ diseases known to date include those listed in the table below.

| | | No. of PolyQ | No. of PolyQ |
|---|---|---|---|
| | | repeats in | repeats in |
| PolyQ Disease | Gene | Normal State | Pathogenic State |
| DRPLA | ATN1 or DRPLA | 6-35 | 49-88 |
| (Dentatorubropallidoluysian atrophy) | | | |
| HD (Huntington's disease) | HTT (Huntingtin) | 10-35 | 35+ |
| SBMA | Androgen receptor on the | 9-36 | 38-62 |
| (Spinobulbar muscular | X chromosome. | | |
| atrophy or Kennedy disease) | | | |
| SCA1 | ATXN1 | 6-35 | 49-88 |
| (Spinocerebellar ataxia Type 1) | | | |
| SCA2 | ATXN2 | 14-32 | 33-77 |
| (Spinocerebellar ataxia Type 2) | | | |
| SCA3 | ATXN3 | 12-40 | 55-86 |
| (Spinocerebellar ataxia Type 3 or | | | |
| Machado-Joseph disease) | | | |
| SCA6 | CACNA1A | 4-18 | 21-30 |
| (Spinocerebellar ataxia Type 6) | | | |
| SCA7 | ATXN7 | 7-17 | 38-120 |
| (Spinocerebellar ataxia Type 7) | | | |
| SCA17 | TBP | 25-42 | 47-63 |
| (Spinocerebellar ataxia Type 17) | | | |

Source: “Trinucleotide repeat disorder” on Wickipedia, 2013

[0062] Besides being encoded by a gene comprising repeated CAG codons, the polyQ proteins involved in polyQ diseases have no structural similarity otherwise. Several polyQ proteins have nuclear functions relating to gene regulation (Riley B E, et al., Genes Dev. 2006; 20(16):2183-92). Toxicity in these disorders depends on the flanking protein context of the polyQ tract, and is frequently associated with transport to the nucleus of the full length or a toxic fragment of the mutant protein (La Spada A R, et al. Curr Med Chem. 2010; 17(27):3058-68, Robertson et al., Curr Med Chem (2010) 17(27): 3058-3068).

[0063] Neurodegenerative Diseases (ND)

[0064] Neurodegenerative diseases are defined as hereditary and sporadic conditions which are characterized by progressive nervous system dysfunction. These disorders are often associated with atrophy of the affected central or peripheral structures of the nervous system. They include diseases such as Alzheimer's Disease and other dementias, Brain Cancer, Degenerative Nerve Diseases, Encephalitis, Epilepsy, Genetic Brain Disorders, Head and Brain Malformations, Hydrocephalus, Stroke, Parkinson's Disease, Multiple Sclerosis, Amyotrophic Lateral Sclerosis (ALS or Lou Gehrig's Disease), Huntington's Disease, Prion Diseases, and others.

[0065] There are extensive overlaps between SCA and other neurodegenerative diseases (NDs) (Shan J, Diamond M I. Hum Mol Genet. 2007; 16 Spec No. 2:R115-23; Bauer P O, Nukina N. J Neurochem. 2009; 110(6):1737-65; La Spada A R, Taylor J P. Nat Rev Genet. 2010; 11(4):247-58; He X H, Lin F, Qin Z H. Neurosci Bull. 2010; 26(3):247-56). Although neuronal cell loss is most evident in the regions responsible for the principal clinical presentation of NDs, neurodegeneration is nearly always more widespread (Gomez C M, et al. Ann Neurol. 1997; 42(6):933-50; Koeppen A H. Journal of Neuropathology & Experimental Neurology. 1998; 57(6):531-43; Havel L S et al. Mol Brain. 2009; 2:21; Pula J H, et al., 2011; 35(3):108-14). Moreover, there is an increasing overlap in possible disease mechanisms. For example, there are growing mechanistic genetic overlaps between ALS and SCA2 (24) and SCA6 and epilepsy (Yalcin O. Seizure. 2011, Rajakulendran S, et al., 2012). Thus, insights into molecular pathogenesis in each disease will have a wider impact on understanding neuronal death and dysfunction in other systems.

[0066] The steps of the method of treating SCA6 provided herein are proposed as being useful in the treatment of other neurodegenerative diseases. Accordingly, the invention provides methods of treating a neurodegenerative disease. In exemplary aspects, the method comprises the step of administering to the subject an IRES inhibitor in an amount effective for treating the neurodegenerative disease. In exemplary aspects, the neurodegenerative disease is episodic ataxia type 2, familial hemiplegic migraine, and epilepsy, Alzheimer's Disease and other dementias, Brain Cancer, Degenerative Nerve Diseases, Encephalitis, Epilepsy, Genetic Brain Disorders, Head and Brain Malformations, Hydrocephalus, Stroke, Parkinson's Disease, Multiple Sclerosis, Amyotrophic Lateral Sclerosis (ALS or Lou Gehrig's Disease), Huntington's Disease, Prion Diseases, and others. In exemplary aspects, the neurodegenerative disease is SCA6.

[0067] In exemplary embodiments, the methods comprise administering to the subject (i) an antisense molecule that binds to a portion of an IRES of a CACNA1A gene comprising the sequence of SEQ ID NO: 180, optionally, wherein the antisense molecule binds to Argonaute 4 (Ago4), (ii) a vector encoding the antisense molecule, (iii) a cell comprising the vector or antisense molecule, (iv) a extracellular vesicle comprising the antisense molecule, or (v) a combination thereof. Optionally, the vector is a recombinant expression vector of as described herein, the cell is a cell as described herein, or the extracellular vesicle is an extracellular vesicle as described herein. In exemplary aspects, the antisense molecule comprises the sequence of SEQ ID NO: 179. In exemplary aspects, the vector is a recombinant adeno-associated viral (AAV) vector, e.g., an AAV serotype 9 (AAV9) vector. In exemplary aspects, the recombinant AAV vector comprises one or more of a promoter, a pair of inverted terminal repeats (ITRs), and a polyadenylation signal sequence. In exemplary aspects, the promoter is a human cytomegalovirus (CMV) immediate early promoter. In exemplary aspects, the ITRs are AAV ITRs. In exemplary aspects, the polyadenylation signal sequence is an simian virus 40 (SV40) polyadenylation signal sequence. In exemplary aspects, the recombinant expression vector comprises a woodchuck hepatitis virus posttranscriptional regulatory element (WPRE). In exemplary aspects, the recombinant expression vector comprises an ITR upstream of the human CMV immediate early promoter, which is located upstream of the nucleotide sequence encoding the antisense molecule, which is located upstream of the WPRE which is located upstream of the SV40 polyadenylation signal sequence which is located upstream of the other ITR.

[0068] IRES Inhibitors

[0069] The methods of the invention comprise the step of administering to a subject an IRES inhibitor. As used herein, the term “IRES” is synonymous with “internal ribosome entry site” and refers to a nucleotide sequence that allows for the initiation of translation in the middle of a messenger ribonucleic acid (mRNA) sequence as part of the greater process of protein synthesis. IRES-mediated translation in exemplary embodiments is considered as “cap-independent” translation. In exemplary aspects, the IRES is located in the 5′ untranslated region (5′ UTR) of a gene. In alternative aspects, the IRES is located within the middle of a mRNA.

[0070] As used herein, the term “IRES inhibitor” refers to any compound that inhibits IRES-mediated activity, e.g., IRES-mediated translation of an mRNA or IRES protein binding. In exemplary embodiments, the IRES inhibitor is a nucleic acid, a nucleic acid analog, a peptide, a polypeptide, a peptidomimetic, a peptoid, a small molecular weight compound, or the like. In exemplary aspects, the IRES inhibitor is an antisense molecule that binds to mRNA produced by a gene which gene is known to be causative of a particular disease. In exemplary aspects, the antisense molecule is an antisense oligonucleotide comprising deoxyribonucleic acid (DNA) and/or ribonucleic acid (RNA). In exemplary aspects, the antisense molecule is an antisense nucleic acid analog comprising a structural analog of DNA and/or RNA. In exemplary aspects, the antisense molecule is synthetic. As used herein, the term “synthetic” refers to a manufactured or engineered compound or molecule which does not occur or exist in nature. In alternative exemplary aspects, the IRES inhibitor is a small molecular weight compound having a molecular weight of less than about 10 kDa, as measured by, for example, gel filtration chromatography. One skilled in the art will appreciate that a small molecular weight compound can be a non-peptidic compound that is cell-permeable and resistant to degradation. The term “non-peptidic” as used herein refers to not being derived from a protein. The IRES inhibitor may be natural, synthetic, or semi-synthetic or partially synthetic.

[0071] The IRES inhibitor may inhibit any one or more of IRES-mediated activities. In exemplary aspects, the IRES inhibitor inhibits IRES-mediated translation of an mRNA and/or IRES-mediated protein binding. For example, the IRES inhibitor may be a compound which blocks the binding of an IRES trans-acting factor (ITAF) to an IRES. In exemplary aspects, the IRES inhibitor binds to or adjacent to the IRES and effectively blocks the binding of the ITAF to the IRES. In alternative aspects, the IRES inhibitor binds to the ITAF and blocks the binding of the ITAF to the IRES. The IRES inhibitor may binds to the ITAF within or adjacent to the IRES-binding site of the ITAF, thereby blocking the ITAF's ability to bind to the IRES.

[0072] In additional or alternative embodiments, the IRES inhibitor blocks translation of an mRNA through additional or alternative mechanisms. In exemplary aspects, the IRES inhibitor alters the primary, secondary, and/or tertiary structure of the IRES. In exemplary aspects, the IRES inhibitor effects the change in structure of the IRES by cleaving within the IRES or modifying the chemico-physico attributes of the IRES.

[0073] The IRES inhibitor may provide any level of inhibition of IRES-mediated activity. In exemplary aspects, the IRES inhibitor inhibits at least 10% IRES-mediated activity. In exemplary aspects, the IRES inhibitor achieves at least a 50% inhibition of IRES-mediated activity. In exemplary aspects, the IRES inhibitor achieves at least a 90% inhibition of IRES-mediated activity. In exemplary aspects, the IRES inhibitor inhibits at least 10% IRES-mediated translation. In exemplary aspects, the IRES inhibitor achieves at least a 50% inhibition of IRES-mediated translation. In exemplary aspects, the IRES inhibitor achieves at least a 90% inhibition of IRES-mediated translation. Methods of testing IRES-mediated translation, and thus, methods of inhibiting IRES-mediated translation, are known in the art. See, for example, Du et al., Cell 154: 118-133 (2013) and Examples 1 and 2 herein. In exemplary aspects, methods of testing the inhibition of IRES-mediated translation comprises use of one or more bi-cistronic reporter constructs. In exemplary aspects, the IRES inhibitor inhibits at least 10% IRES-mediated protein binding, e.g., IRES-protein binding. In exemplary aspects, the IRES inhibitor achieves at least a 50% inhibition of IRES-protein binding. In exemplary aspects, the IRES inhibitor achieves at least a 90% inhibition of IRES-protein binding. Methods of testing levels of IRES-protein binding are known in the art and include for example electrophoretic mobility shift assay (EMSA). See, e.g., Ausubel, Frederick M. (1994). Current Protocols in molecular biology. Chichester: John Wiley & Sons. pp. 12.2.1-11, and Example 1 herein.

[0074] In exemplary aspects, the IRES inhibitor targets an IRES within a viral genome. In exemplary aspects, the IRES inhibitor does not target an IRES within a viral genome. IRESs found within a viral genome are known in the art and include, for example, a picornavirus IRES, aphthovirus IRES, Hepatitis A IRES, Hepatitis C IRES, Pestivirus IRES, Cripavirus IRES, Kaposi's sarcoma associated herpesvirus IRES, and the Marek's disease virus IRES. The IRES inhibitor in exemplary aspects targets an IRES within a poliovirus genome, a rhinovirus genome, an encephalomyocarditis virus genome, a foot-and-mouth disease virus genome, a Hepatitis A virus genome, a Hepatitis C virus genome, a classical swine fever virus genome, a bovine viral diarrhea virus genome, a friend murine leukemia virus genome, a Moloney murine leukemia virus genome, a Rous sarcoma virus genome, a Human immunodeficiency virus genome, a Plautia stali intestine virus genome, a Rhopalosiphum padi virus genome, a Cricket paralysis virus genome, a Triatoma virus genome, a Kaposi's sarcoma associated herpes virus genome, or a Marek's disease virus genome.

[0075] In exemplary aspects, the IRES inhibitor targets an IRES within a cellular mRNA. In exemplary aspects, the IRES inhibitor does not target an IRES within a cellular mRNA. In exemplary aspects, the cellular mRNA encodes a growth factor, a transcription factor, a translation factor, an oncogene, a transporter, a receptor, an activator of apoptosis, or a protein localized in neuronal dendrites. In exemplary aspects, the IRES inhibitor targets or does not target an mRNA encoding any one or more of the following proteins: Fibroblast growth factor (FGF-1, FGF-2), Platelet-derived growth factor B (PDGF/c-sis), Vascular endothelial growth factor (VEGF), Insulin-like growth factor 2 (IGF-II), the Antennapedia, Ultrabithorax, MYT-2, NF-κB repressing factor NRF, AML1/RUNX1, Gtx homeodomain protein, Eukaryotic initiation factor 4G (e1F4G)a, Eukaryotic initiation factor 4G1 (e1F4G1)a, Death associated protein 5 (DAP5), c-myc, L-myc, Pim-1, Protein kinase p58PITSLRE, p53, Cationic amino acid transporter Cat-1, Nuclear form of Notch 2, Voltage-gated potassium channel, Apoptotic protease activating factor (Apaf-1), X-linked inhibitor of apoptosis (XIAP), HIAP2, Bc1-xL, Bc1-2, Activity-regulated cytoskeletal protein (ARC), α-subunit of calcium calmodulin dependent kinase II dendrin, Microtubule-associated protein 2 (MAP2), neurogranin (RC3), Amyloid precursor protein, Immunoglobulin heavy chain binding protein (BiP), Heat shock protein 70, β-subunit of mitochondrial H+-ATP synthase, Ornithine decarboxylase, connexins 32 and 43, HIF-1α, APC.

[0076] In exemplary aspects, the IRES inhibitor targets the IRES of a gene associated with a diseased state. In exemplary aspects, the IRES inhibitor targets the IRES of a gene associated with a genetic disorder, e.g., a trinucleotide repeat disorder. In exemplary aspects, the IRES inhibitor targets the IRES of a gene associated with a polyglutamine disease. Genes associated with a polyQ disease are described herein. See, e.g., the table in the section entitled “Polyglutamine Diseases.”

[0077] In exemplary aspects, the IRES inhibitor targets the IRES of an mRNA encoding a calcium channel or a transcription factor. In exemplary aspects, the IRES inhibitor targets the IRES of a bi-cistronic mRNA encoding both a calcium channel and a transcription factor. In exemplary aspects, the IRES inhibitor targets the IRES of the α1A mRNA, which is encoded by the CACNA1A gene. The CACNA1A gene, officially named as the calcium channel, voltage-dependent, P/Q type, alpha 1A subunit gene, is described in the Gene database of the National Center for Biotechnology Information (NCBI) as Gene ID 773. The gene encodes 5 isoforms of the α1A protein, a voltage-gated calcium channel subunit. Each are provided in the GenBank database as follows: α1A Isoform 1 (NP_000059); α1A Isoform 2 (NP_075461.2),α1A Isoform 3 (NP_001120693.1), α1A Isoform 4 (NP_001120694.1), and α1A Isoform 5 (NP_001167551.1). While the IRES is present in all five isoforms, the mRNA encoding Isoforms 1, 3, and 5 do not have the polyQ tract, whereas the mRNA encoding Isoforms 2 and 4 comprise the polyQ tract. In exemplary aspects, the IRES inhibitor targets the IRES of the mRNA of the α1A Isoform 2 or of the α1A Isoform 4. The CACNA1A gene also encodes the α1ACT protein, a transcription factor that coordinates expression of a program of genes involved in neural and Purkinje cell development. The sequence of the nucleic acid encoding the α1ACT protein is known in the art and is set forth herein as SEQ ID NO: 4.

[0078] In exemplary aspects, the IRES inhibitor blocks binding of the IRES of the α1A mRNA to an IRES ITAF which binds to the IRES of the α1A mRNA. In exemplary aspects, the IRES inhibitor binds to an ITAF that binds to the IRES of the α1A mRNA. In exemplary aspects, the IRES inhibitor binds to or adjacent to the IRES of the α1A mRNA.

[0079] In exemplary aspects, the IRES inhibitor is an antisense molecule which permits specific suppression or reduction of expression of the nucleic acid (e.g., the mRNA) encoding the α1ACT protein. In exemplary aspects, the IRES inhibitor is an antisense molecule which permits specific suppression or reduction of expression of the nucleic acid (e.g., the mRNA) encoding the α1ACT protein without affecting the expression of the nucleic acid of the α1A protein. In exemplary aspects, the IRES inhibitor causes specific suppression of translation of the nucleic acid (e.g., the mRNA) encoding the α1ACT protein without causing degradation of the α1A mRNA and/or without inhibition of expression of the α1A protein.

[0080] In exemplary aspects, the antisense molecule can be complementary to the entire coding region of the nucleic acid encoding the α1ACT protein (SEQ ID NO: 4), or to a portion thereof. The antisense molecule in exemplary aspects is about 5, about 10, about 15, about 20, about 25, about 30, about 35, about 40, about 45 or about 50 nucleotides in length.

[0081] In exemplary aspects, the antisense molecule is about X to about Y nucleotides in length, wherein X is 10, 11, 12, 13, 14, or 15 and Y is 20, 21, 22, 23, 24, 25, 26, 27, 28, 29, or 30. In exemplary aspects, the antisense molecule is about 10 to about 20 nucleotides in length, about 10 to about 21 nucleotides in length, about 10 to about 22 nucleotides in length, about 10 to about 23 nucleotides in length, about 10 to about 24 nucleotides in length, about 10 to about 25 nucleotides in length, about 10 to about 26 nucleotides in length, about 10 to about 27 nucleotides in length, about 10 to about 28 nucleotides in length, about 10 to about 29 nucleotides in length, or about 10 to about 30 nucleotides in length. In exemplary aspects, the antisense molecule is about 11 to about 20 nucleotides in length, about 11 to about 21 nucleotides in length, about 11 to about 22 nucleotides in length, about 11 to about 23 nucleotides in length, about 11 to about 24 nucleotides in length, about 11 to about 25 nucleotides in length, about 11 to about 26 nucleotides in length, about 11 to about 27 nucleotides in length, about 11 to about 28 nucleotides in length, about 11 to about 29 nucleotides in length, or about 11 to about 30 nucleotides in length. In exemplary aspects, the antisense molecule is about 12 to about 20 nucleotides in length, about 12 to about 21 nucleotides in length, about 12 to about 22 nucleotides in length, about 12 to about 23 nucleotides in length, about 12 to about 24 nucleotides in length, about 12 to about 25 nucleotides in length, about 12 to about 26 nucleotides in length, about 12 to about 27 nucleotides in length, about 12 to about 28 nucleotides in length, about 12 to about 29 nucleotides in length, or about 12 to about 30 nucleotides in length. In exemplary aspects, the antisense molecule is about 13 to about 20 nucleotides in length, about 13 to about 21 nucleotides in length, about 13 to about 22 nucleotides in length, about 13 to about 23 nucleotides in length, about 13 to about 24 nucleotides in length, about 13 to about 25 nucleotides in length, about 13 to about 26 nucleotides in length, about 13 to about 27 nucleotides in length, about 13 to about 28 nucleotides in length, about 13 to about 29 nucleotides in length, or about 13 to about 30 nucleotides in length. In exemplary aspects, the antisense molecule is about 14 to about 20 nucleotides in length, about 14 to about 21 nucleotides in length, about 14 to about 22 nucleotides in length, about 14 to about 23 nucleotides in length, about 14 to about 24 nucleotides in length, about 14 to about 25 nucleotides in length, about 14 to about 26 nucleotides in length, about 14 to about 27 nucleotides in length, about 14 to about 28 nucleotides in length, about 14 to about 29 nucleotides in length, or about 14 to about 30 nucleotides in length. In exemplary aspects, the antisense molecule is about 15 to about 20 nucleotides in length, about 15 to about 21 nucleotides in length, about 15 to about 22 nucleotides in length, about 15 to about 23 nucleotides in length, about 15 to about 24 nucleotides in length, about 15 to about 25 nucleotides in length, about 15 to about 26 nucleotides in length, about 15 to about 27 nucleotides in length, about 15 to about 28 nucleotides in length, about 15 to about 29 nucleotides in length, or about 15 to about 30 nucleotides in length. In exemplary aspects, the antisense molecule is about 15 to about 30 nucleotides in length or about 20 to 30 nucleotides in length or about 25 to 30 nucleotides in length. In exemplary aspects, the antisense molecule is about 25 nucleotides in length.

[0082] In exemplary aspects, the antisense molecule binds to at least a portion of the sequence of SEQ ID NO: 5 of the α1A mRNA. SEQ ID NO: 5 is a portion of the sequence of the nucleic acid encoding the α1ACT protein (known in the art as GenBank Accession No. NM_01127222 and provided herein as SEQ ID NO: 4. SEQ ID NO: 5 is 5101 through 6110 bp of GenBank Accession No. NM_01127222 (SEQ ID NO: 4)). In exemplary aspects, the antisense molecule binds to at least a portion of the sequence of SEQ ID NO: 5 of the α1A mRNA, wherein the portion is at least 5 contiguous nucleotides (or at least 2 or at least 3 contiguous nucleotides) of SEQ ID NO: 5. In exemplary aspects, the antisense molecule binds to at least 15 contiguous nucleotides of the sequence of SEQ ID NO: 5. In exemplary aspects, the antisense molecule binds to at least 20 contiguous nucleotides of the sequence of SEQ ID NO: 5. In exemplary aspects, the antisense molecule binds to at least 25 contiguous nucleotides of the sequence of SEQ ID NO: 5. In exemplary aspects, the antisense molecule binds to a portion of the α1A mRNA (and for purposes herein, this portion is termed hereinafter as a target sequence) and the target sequence comprises the ATG start site (i.e., start codon) of the sequence encoding α1ACT (plus flanking sequence upstream and/or downstream of the ATG start site). The coding sequence of α1ACT is provided herein as SEQ ID NO: 12 and the α1A mRNA comprising the coding sequence and the ATG start site is provided herein as SEQ ID NO: 4. In exemplary aspects, the antisense molecule binds to a target sequence of the α1A mRNA, which target sequence is located upstream or 5′ to the ATG start codon of the sequence encoding α1ACT. In exemplary aspects, the antisense molecule binds to a target sequence which is located within the 200 nucleotides immediately upstream or 5′ to the ATG start codon of the sequence encoding α1ACT. In exemplary aspects, the antisense molecule binds to a target sequence which is located within the 100 nucleotides immediately upstream or 5′ to the ATG start codon of the sequence encoding α1ACT. In exemplary aspects, the antisense molecule binds to a target sequence which is located within the 50 nucleotides immediately upstream or 5′ to the ATG start codon of the sequence encoding α1ACT. In exemplary aspects, the antisense molecule binds to a target sequence which is located within the 25 nucleotides immediately upstream or 5′ to the ATG start codon of the sequence encoding α1ACT. In exemplary aspects, the antisense molecule binds to a target sequence which is located within the 15 nucleotides immediately upstream or 5′ to the ATG start codon of the sequence encoding α1ACT. In exemplary aspects, the antisense molecule binds to a target sequence of the α1A mRNA, which target sequence is located downstream or 3′ to the ATG start codon of the sequence encoding α1ACT. In exemplary aspects, the antisense molecule binds to a target sequence which is located within the 200 nucleotides immediately downstream or 3′ to the ATG start codon of the sequence encoding α1ACT. In exemplary aspects, the antisense molecule binds to a target sequence which is located within the 100 nucleotides immediately downstream or 3′ to the ATG start codon of the sequence encoding α1ACT. In exemplary aspects, the antisense molecule binds to a target sequence which is located within the 50 nucleotides immediately downstream or 3′ to the ATG start codon of the sequence encoding α1ACT. In exemplary aspects, the antisense molecule binds to a target sequence which is located within the 25 nucleotides immediately downstream or 3′ to the ATG start codon of the sequence encoding α1ACT. In exemplary aspects, the antisense molecule binds to a target sequence which is located within the 15 nucleotides immediately downstream or 3′ to the ATG start codon of the sequence encoding α1ACT.

[0083] In exemplary aspects, the antisense molecule binds to at least a portion of the sequence of SEQ ID NO: 6 of the α1A mRNA. In exemplary aspects, the antisense molecule binds to at least a portion of the sequence of SEQ ID NO: 6 of the α1A mRNA, wherein the portion is at least 3 contiguous nucleotides (or at least 5 or at least 2 contiguous nucleotides) of SEQ ID NO: 6. In exemplary aspects, the antisense molecule binds to at least 15 contiguous nucleotides of the sequence of SEQ ID NO: 6. In exemplary aspects, the antisense molecule binds to at least 20 contiguous nucleotides of the sequence of SEQ ID NO: 6. In exemplary aspects, the antisense molecule binds to at least 25 contiguous nucleotides of the sequence of SEQ ID NO: 6. In exemplary aspects, the antisense molecule binds to at least a portion of the sequence of SEQ ID NO: 7 of the α1A mRNA. In exemplary aspects, the antisense molecule binds to at least a portion of the sequence of SEQ ID NO: 7 of the α1A mRNA, wherein the portion is at least 2 contiguous nucleotides (or at least 5 or at least 3 contiguous nucleotides) of SEQ ID NO: 7. In exemplary aspects, the antisense molecule binds to the entire sequence of SEQ ID NO: 7.

[0084] In exemplary aspects, the antisense molecule is an antisense oligonucleotide or antisense nucleic acid analog which is complementary to at least a portion of the sequence of SEQ ID NO: 5, SEQ ID NO: 6, or SEQ ID NO: 7. The antisense molecule in some aspects is complementary to at least 15 contiguous bases of said sequence. The antisense molecule in some aspects is complementary to at least 20 contiguous bases of the sequence of SEQ ID NO: 5, SEQ ID NO: 6, or SEQ ID NO: 7. The antisense molecule in some aspects is complementary to at least 25 contiguous bases of the sequence of SEQ ID NO: 5, SEQ ID NO: 6, or SEQ ID NO: 7. In exemplary aspects, the antisense molecule is an antisense oligonucleotide or antisense nucleic acid analog comprising at least 15 contiguous bases of SEQ ID NO: 9, SEQ ID NO: 10, or SEQ ID NO: 11, which are complementary sequences of SEQ ID NOs: 5-7, respectively. In exemplary aspects, the antisense molecule is an antisense oligonucleotide or antisense nucleic acid analog comprising at least 15 contiguous bases that differs by not more than 3 bases from a portion of 15 contiguous bases of SEQ ID NO: 9, SEQ ID NO: 10, or SEQ ID NO: 11. In exemplary aspects, the antisense molecule is an antisense oligonucleotide or antisense nucleic acid analog comprising at least 15 contiguous bases that is at least 90% identical to a portion of 15 contiguous bases of SEQ ID NO: 9, SEQ ID NO: 10, or SEQ ID NO: 11. In exemplary aspects, the antisense molecule is an antisense oligonucleotide or antisense nucleic acid analog comprising, consisting essentially of, or consisting of SEQ ID NO: 8.

[0085] In exemplary aspects, the antisense molecule binds to at least a portion of the sequence of SEQ ID NO: 56 of the α1A mRNA. In exemplary aspects, the antisense molecule binds to at least a portion of the sequence of SEQ ID NO: 56 of the α1A mRNA, wherein the portion is at least 2 contiguous nucleotides (or at least 5 or at least 3 contiguous nucleotides) of SEQ ID NO: 56. In exemplary aspects, the antisense molecule binds to the entire sequence of SEQ ID NO: 56. In exemplary aspects, the antisense molecule binds to at least a portion of the sequence of SEQ ID NO: 57 of the α1A mRNA. In exemplary aspects, the antisense molecule binds to at least a portion of the sequence of SEQ ID NO: 57 of the α1A mRNA, wherein the portion is at least 2 contiguous nucleotides (or at least 5 or at least 3 contiguous nucleotides) of SEQ ID NO: 57. In exemplary aspects, the antisense molecule binds to the entire sequence of SEQ ID NO: 57.

[0086] In exemplary aspects, the antisense molecule is an antisense oligonucleotide or antisense nucleic acid analog which is complementary to at least a portion of the sequence of SEQ ID NO: 56 or SEQ ID NO: 57. The antisense molecule in some aspects is complementary to at least 15 contiguous bases of said sequence. The antisense molecule in some aspects is complementary to at least 20 contiguous bases of the sequence of SEQ ID NO: 56 or SEQ ID NO: 57. The antisense molecule in some aspects is complementary to at least 25 contiguous bases of the sequence of SEQ ID NO: 56. In exemplary aspects, the antisense molecule is an antisense oligonucleotide or antisense nucleic acid analog comprising at least 15 contiguous bases of SEQ ID NO: 58 or SEQ ID NO: 59, which are complementary sequences of SEQ ID NOs: 56 and 57, respectively. In exemplary aspects, the antisense molecule is an antisense oligonucleotide or antisense nucleic acid analog comprising at least 15 contiguous bases that differs by not more than 3 bases from a portion of 15 contiguous bases of SEQ ID NO: 58 or SEQ ID NO: 59. In exemplary aspects, the antisense molecule is an antisense oligonucleotide or antisense nucleic acid analog comprising at least 15 contiguous bases that is at least 90% identical to a portion of 15 contiguous bases of SEQ ID NO: 58 or SEQ ID NO: 59. In exemplary aspects, the antisense molecule is an antisense oligonucleotide or antisense nucleic acid analog comprising, consisting essentially of, or consisting of SEQ ID NO: 55.

[0087] In exemplary aspects, the antisense molecule binds to at least a portion of the sequence of SEQ ID NO: 180. In exemplary aspects, the antisense molecule binds to at least a portion of the sequence of SEQ ID NO: 180 of the α1A mRNA, wherein the portion is at least 5 contiguous nucleotides (or at least 2 or at least 3 contiguous nucleotides) of SEQ ID NO: 180. In exemplary aspects, the antisense molecule binds to at least 15 contiguous nucleotides of the sequence of SEQ ID NO: 180. In exemplary aspects, the antisense molecule binds to at least 20 contiguous nucleotides of the sequence of SEQ ID NO: 180. In exemplary aspects, the antisense molecule binds to at least 25 contiguous nucleotides of the sequence of SEQ ID NO: 180.

[0088] In exemplary aspects, the antisense molecule is an antisense oligonucleotide or antisense nucleic acid analog which is complementary to at least a portion of the sequence of SEQ ID NO: 180. The antisense molecule in some aspects is complementary to at least 15 contiguous bases of said sequence. The antisense molecule in some aspects is complementary to at least 20 contiguous bases of the sequence of SEQ ID NO: 180. The antisense molecule in some aspects is complementary to at least 25 contiguous bases of the sequence of SEQ ID NO: 180. In exemplary aspects, the antisense molecule is an antisense oligonucleotide or antisense nucleic acid analog comprising at least 15 contiguous bases of SEQ ID NO: 179. In exemplary aspects, the antisense molecule is an antisense oligonucleotide or antisense nucleic acid analog comprising at least 15 contiguous bases that differs by not more than 3 bases from a portion of 15 contiguous bases of SEQ ID NO: 179. In exemplary aspects, the antisense molecule is an antisense oligonucleotide or antisense nucleic acid analog comprising at least 15 contiguous bases that is at least 90% identical to a portion of 15 contiguous bases of SEQ ID NO: 179. In exemplary aspects, the antisense molecule is an antisense oligonucleotide or antisense nucleic acid analog comprising, consisting essentially of, or consisting of SEQ ID NO: 179.

[0089] The antisense molecule can be one which mediates RNA interference (RNAi). As known by one of ordinary skill in the art, RNAi is a ubiquitous mechanism of gene regulation in plants and animals in which target mRNAs are degraded in a sequence-specific manner (Sharp, Genes Dev., 15, 485-490 (2001); Hutvagner et al., Curr. Opin. Genet. Dev., 12, 225-232 (2002); Fire et al., Nature, 391, 806-811 (1998); Zamore et al., Cell, 101, 25-33 (2000)). The natural RNA degradation process is initiated by the dsRNA-specific endonuclease Dicer, which promotes cleavage of long dsRNA precursors into double-stranded fragments between 21 and 25 nucleotides long, termed small interfering RNA (siRNA; also known as short interfering RNA) (Zamore, et al., Cell. 101, 25-33 (2000); Elbashir et al., Genes Dev., 15, 188-200 (2001); Hammond et al., Nature, 404, 293-296 (2000); Bernstein et al., Nature, 409, 363-366 (2001)). siRNAs are incorporated into a large protein complex that recognizes and cleaves target mRNAs (Nykanen et al., Cell, 107, 309-321 (2001). It has been reported that introduction of dsRNA into mammalian cells does not result in efficient Dicer-mediated generation of siRNA and therefore does not induce RNAi (Caplen et al., Gene 252, 95-105 (2000); Ui-Tei et al., FEBS Lett, 479, 79-82 (2000)). The requirement for Dicer in maturation of siRNAs in cells can be bypassed by introducing synthetic 21-nucleotide siRNA duplexes, which inhibit expression of transfected and endogenous genes in a variety of mammalian cells (Elbashir et al., Nature, 411: 494-498 (2001)).

[0090] In this regard, the IRES inhibitor in some aspects mediates RNAi and in some aspects is a siRNA molecule specific for inhibiting the expression of the nucleic acid (e.g., the mRNA) encoding the α1ACT protein. The term “siRNA” as used herein refers to an RNA (or RNA analog) comprising from about 10 to about 50 nucleotides (or nucleotide analogs) which is capable of directing or mediating RNAi. In exemplary embodiments, an siRNA molecule comprises about 15 to about 30 nucleotides (or nucleotide analogs) or about 20 to about 25 nucleotides (or nucleotide analogs), e.g., 21-23 nucleotides (or nucleotide analogs). The siRNA can be double or single stranded, preferably double-stranded.

[0091] In alternative aspects, the IRES inhibitor is alternatively a short hairpin RNA (shRNA) molecule specific for inhibiting the expression of the nucleic acid (e.g., the mRNA) encoding the α1ACT protein. The term “shRNA” as used herein refers to a molecule of about 20 or more base pairs in which a single-stranded RNA partially contains a palindromic base sequence and forms a double-strand structure therein (i.e., a hairpin structure). An shRNA can be an siRNA (or siRNA analog) which is folded into a hairpin structure. shRNAs typically comprise about 45 to about 60 nucleotides, including the approximately 21 nucleotide antisense and sense portions of the hairpin, optional overhangs on the non-loop side of about 2 to about 6 nucleotides long, and the loop portion that can be, e.g., about 3 to 10 nucleotides long. The shRNA can be chemically synthesized. Alternatively, the shRNA can be produced by linking sense and antisense strands of a DNA sequence in reverse directions and synthesizing RNA in vitro with T7 RNA polymerase using the DNA as a template.

[0092] Though not wishing to be bound by any theory or mechanism it is believed that after shRNA is introduced into a cell, the shRNA is degraded into a length of about 20 bases or more (e.g., representatively 21, 22, 23 bases), and causes RNAi, leading to an inhibitory effect. Thus, shRNA elicits RNAi and therefore can be used as an effective component of the invention. shRNA may preferably have a 3′-protruding end. The length of the double-stranded portion is not particularly limited, but is preferably about 10 or more nucleotides, and more preferably about 20 or more nucleotides. Here, the 3′-protruding end may be preferably DNA, more preferably DNA of at least 2 nucleotides in length, and even more preferably DNA of 2-4 nucleotides in length.

[0093] In exemplary aspects, the antisense molecule is a microRNA (miRNA). As used herein the term “microRNA” refers to a small (e.g., 15-22 nucleotides), non-coding RNA molecule which base pairs with mRNA molecules to silence gene expression via translational repression or target degradation. microRNA and the therapeutic potential thereof are described in the art. See, e.g., Mulligan, MicroRNA: Expression, Detection, and Therapeutic Strategies, Nova Science Publishers, Inc., Hauppauge, N.Y., 2011; Bader and Lammers, “The Therapeutic Potential of microRNAs” Innovations in Pharmaceutical Technology, pages 52-55 (March 2011); and Zhang et al., J Control Release 172(3): 962-974 (2013). In exemplary aspects, the miRNA is a mature miRNA strand.

[0094] In exemplary aspects, the miRNA targets a portion of the IRES of the CACNA1A gene wherein the portion comprises sequence of SEQ ID NO: 180. As understood by the ordinarily skilled artisan, miRNA does not require perfect pairing to its target. Thus, in exemplary aspects, the miRNA binds to at least a portion of the sequence of SEQ ID NO: 180. In exemplary aspects, the miRNA is complementary to at least a portion of the sequence of SEQ ID NO: 180. The miRNA in some aspects is complementary to at least 15 contiguous bases of said sequence. In exemplary aspects, the miRNA comprises at least 15 contiguous bases of SEQ ID NO: 179. In exemplary aspects, the miRNA comprises at least 15 contiguous bases that differ by not more than 3 bases from a portion of 15 contiguous bases of SEQ ID NO: 179. In exemplary aspects, the miRNA comprises at least 15 contiguous bases that is at least 90% identical to a portion of 15 contiguous bases of SEQ ID NO: 179. In exemplary aspects, the miRNA comprises, consists essentially of, or consists of SEQ ID NO: 179. In exemplary aspects, the miRNA is about 15, about 16, about 17, about 18, about 19, about 20, about 21, about 22, about 23, about 24 nt in length.

[0095] In exemplary aspects, the antisense molecule is a precursor of miRNA comprising SEQ ID NO: 179. In exemplary aspects, the antisense molecule is a primary miRNA precursor (pri-miRNA) comprising SEQ ID NO: 179 which is optionally, capped, polyadenylated, and/or comprises double-stranded stem-loop structures. In exemplary aspects, the antisense molecule is a pre-miRNA precursor comprising SEQ ID NO: 179, which is optionally about 70 to about 100 nt long and/or comprises a hairpin structure.

[0096] In exemplary aspects, the miRNA comprises the sequence of SEQ ID NO: 179. In exemplary aspects, the miRNA comprises at least 15 contiguous bases of a sequence that (i) differs from SEQ ID NO: 179 by not more than 3 bases (e.g., not more than 4, 5, 6, 7, 8, 9, 10 bases), (ii) is at least 90% (e.g., at least 93%, at least 95%, at least 98%, at least 99%) identical to the sequence set forth in SEQ ID NO: 179, or (iii) is completely complementary to at least a portion of the sequence of SEQ ID NO: 180.

[0097] In exemplary aspects, the antisense molecule is an antisense oligonucleotide comprising DNA or RNA or both DNA and RNA. In exemplary aspects, the antisense oligonucleotide comprises naturally-occurring nucleotides and/or naturally-occurring internucleotide linkages. The antisense oligonucleotide in some aspects is single-stranded and in other aspects is double-stranded. In exemplary aspects, the antisense oligonucleotide is synthesized and in other aspects is obtained (e.g., isolated and/or purified) from natural sources. In exemplary aspects, the antisense molecule is a phosphodiester oligonucleotide.

[0098] In alternative aspects, the antisense molecule is an antisense nucleic acid analog, e.g., comprising non-naturally-occurring nucleotides and/or non-naturally-occurring internucleotide linkages (e.g., phosphoroamidate linkages, phosphorothioate linkages). In exemplary aspects, the antisense nucleic acid analog comprises at least one non-naturally-occurring nucleotide and/or non-naturally-occurring internucleotide linkage. In exemplary aspects, the antisense nucleic acid analog comprises one or more modified nucleotides, including, but not limited to, 5-fluorouracil, 5-bromouracil, 5-chlorouracil, 5-iodouracil, hypoxanthine, xanthine, 4-acetylcytosine, 5-(carboxyhydroxymethyl) uracil, 5-carboxymethylaminomethyl-2-thiouridine, 5-carboxymethylaminomethyluracil, dihydrouracil, beta-D-galactosylqueuosine, inosine, N⁶-isopentenyladenine, 1-methylguanine, 1-methylinosine, 2,2-dimethylguanine, 2-methyladenine, 2-methylguanine, 3-methylcytosine, 5-methylcytosine, N-substituted adenine, 7-methylguanine, 5-methylammomethyluracil, 5-methoxyaminomethyl-2-thiouracil, beta-D-mannosylqueuosine, 5′-methoxycarboxymethyluracil, 5-methoxyuracil, 2-methylthio-N⁶-isopentenyladenine, uracil-5-oxyacetic acid (v), wybutoxosine, pseudouracil, queuosine, 2-thiocytosine, 5-methyl-2-thiouracil, 2-thiouracil, 4-thiouracil, 5-methyluracil, uracil-5-oxyacetic acid methylester, 3-(3-amino-3-N-2-carboxypropyl) uracil, and 2,6-diaminopurine.

[0099] In exemplary aspects, the antisense nucleic acid comprises non-naturally-occurring nucleotides which differ from naturally occurring nucleotides by comprising a chemical group in place of the phosphate group. In exemplary aspects, the antisense nucleic acid analog comprises or is a methylphosphonate oligonucleotide, which are noncharged oligomers in which a non-bridging oxygen atom, e.g., alpha oxygen of the phosphate, is replaced by a methyl group. In exemplary aspects, the antisense nucleic acid analog comprises or is a phosphorothioate, wherein at least one of the non-bridging oxygen atom, e.g., alpha oxygen of the phosphate, is replaced by a sulfur. In exemplary aspects, the antisense nucleic acid analog comprises or is a boranophosphate olignucleotide, wherein at least one of the non-bridging oxygen atom, e.g., alpha oxygen of the phosphate, is replaced by —BH₃.

[0100] In exemplary aspects, the antisense nucleic acid analog comprises at least one non-naturally-occurring nucleotide which differs from naturally occurring nucleotides by comprising a ring structure other than ribose or 2-deoxyribose. In exemplary aspects, the antisense nucleic acid analog is an analog comprising a replacement of the hydroxyl at the 2′-position of ribose with an O-alkyl group, e.g., —O—CH₃, —OCH₂CH₃. In exemplary aspects, the antisense nucleic acid analog comprises a modified ribonucleotide wherein the 2′ hydroxyl of ribose is modified to methoxy (OMe) or methoxy-ethyl (MOE) group. In exemplary aspects, the antisense nucleic acid analog comprises a modified ribonucleotide wherein the 2′ hydroxyl of ribose is replaced with allyl, amino, azido, halo, thio, O-allyl, O—C₁-C₁₀ alkyl, O—C₁-C₁₀ substituted alkyl, O—C₁-C₁₀ alkoxy, O—C₁-C₁₀ substituted alkoxy, OCF₃, O(CH₂)₂SCH₃, O(CH₂)₂—O—N(R¹)(R²), or O(CH₂)—C(═O)—N(R¹)(R²), wherein each of R¹ and R² is independently selected from the group consisting of H, an amino protecting group or substituted or unsubstituted C₁-C₁₀ alkyl. In exemplary aspects, the antisense nucleic acid analog comprises a modified ribonucleotide wherein the 2′ hydroxyl of ribose is replaced with 2′F, SH, CN, OCN, CF₃, O-alkyl, S-Alkyl, N(R¹)alkyl, O-alkenyl, S-alkenyl, or N(R¹)-alkenyl, O-alkynyl, S-alkynyl, N(R¹)-alkynyl, O-alkylenyl, O-Alkyl, alknyyl, alkaryl, aralkyl, O-alkaryl, or O-aralkyl. In exemplary aspects, the antisense nucleic acid analog is an analog comprising a replacement of the hydrogen at the 2′-position of ribose with halo, e.g., F. In exemplary aspects, the antisense nucleic acid analog comprises a fluorine derivative nucleic acid.

[0101] In exemplary aspects, the antisense nucleic acid analog comprises a substituted ring. In exemplary aspects, the antisense nucleic acid analog is or comprises a hexitol nucleic acid. In exemplary aspects, the antisense nucleic acid analog is or comprises a nucleotide with a bicyclic or tricyclic sugar moiety. In exemplary aspects, the bicyclic sugar moiety comprises a bridge between the 4′ and 2′ furanose ring atoms. Exemplary moieties include, but are not limited to: —[C(Rₐ)(R_{b})]ₙ—, —[C(Rₐ)(R_{b})]ₙ-0-, —C(RₐR_{b})—N(R)-0- or, —C(RₐR_{b})-0-N(R)—; 4′-CH₂-2′, 4′-(CH₂)₂-2′, 4′-(CH₂)₃-2′, 4′-(CH₂)-0-2′ (LNA); 4′-(CH₂)—S-2′; 4′- (CH₂)₂-0-2′ (ENA); 4′-CH(CH₃)-0-2′ (cEt) and 4′-CH(CH₂OCH₃)-0-2′, 4′-C(CH₃)(CH₃)-0-2′, 4′-CH₂—N(OCH₃)-2′, 4′-CH₂-0-N(CH₃)-2′ 4′-CH₂-0-N(R)-2′, and 4′-CH₂—N(R)-0-2′-, wherein each R is, independently, H, a protecting group, or C₁C₁₂ alkyl; 4′-CH₂—N(R)-0-2′, wherein R is H, C1-C12 alkyl, or a protecting group, 4′-CH₂—C(H)(CH₃)-2′, 4′-CH₂—C(═CH₂)-2′. Such antisense nucleic acid analogs are known in the art. See, e.g., International Application Publication No. WO 2008/154401, U.S. Pat. No. 7,399,845, International Application Publication No. WO2009/006478, International Application Publication No. WO2008/150729, U.S. Application Publication No. US2004/0171570, U.S. Pat. No. 7,427,672, and Chattopadhyaya, et al, J. Org. Chem., 2009, 74, 118-134). In exemplary aspects, the antisense nucleic acid analog comprises a nucleoside comprising a bicyclic sugar moiety, or a bicyclic nucleoside (BNA). In exemplary aspects, the antisense nucleic acid analog comprises a BNA selected from the group consisting of: α-L-Methyleneoxy (4′-CH₂-0-2′) BNA, Aminooxy (4′-CH₂-0-N(R)-2′) BNA, β-D-Methyleneoxy (4′-CH₂-0-2′) BNA, Ethyleneoxy (4′-(CH₂)₂-0-2′) BNA, methylene-amino (4′-CH2-N(R)-2′) BNA, methyl carbocyclic (4′-CH₂—CH(CH₃)-2′) BNA, Methyl(methyleneoxy) (4′-CH(CH₃)—O-2′) BNA (also known as constrained ethyl or cEt), methylene-thio (4′-CH₂—S-2′) BNA, Oxyamino (4′-CH₂—N(R)-0-2′) BNA, and propylene carbocyclic (4′-(CH₂)₃-2′) BNA. Such BNAs are described in the art. See, e.g., International Patent Publication No. WO 2014/071078.

[0102] In exemplary aspects, the antisense nucleic acid analog comprises a modified backbone. In exemplary aspects, the antisense nucleic acid analog is or comprises a peptide nucleic acid (PNA) containing an uncharged flexible polyamide backbone comprising repeating N-(2-aminoethyl)glycine units to which the nucleobases are attached via methylene carbonyl linkers. In exemplary aspects, the antisense nucleic acid analog comprises a backbone substitution. In exemplary aspects, the antisense nucleic acid analog is or comprises an N3′→P5′ phosphoramidate, which results from the replacement of the oxygen at the 3′ position on ribose by an amine group. Such nucleic acid analogs are further described in Dias and Stein, Molec Cancer Ther 1: 347-355 (2002). In exemplary aspects, the antisense nucleic acid analog comprises a nucleotide comprising a conformational lock. In exemplary aspects, the antisense nucleic acid analog is or comprises a locked nucleic acid.

[0103] In exemplary aspects, the antisense nucleic acid analog comprises a 6-membered morpholine ring, in place of the ribose or 2-deoxyribose ring found in RNA or DNA. In exemplary aspects, the antisense nucleic acid analog comprises non-ionic phophorodiamidate intersubunit linkages in place of anionic phophodiester linkages found in RNA and DNA. In exemplary aspects, the nucleic acid analog comprises nucleobases (e.g., adenine (A), cytosine (C), guanine (G), thymine, thymine (T), uracil (U)) found in RNA and DNA. In exemplary aspects, the IRES inhibitor is a Morpholino oligomer comprising a polymer of subunits, each subunit of which comprises a 6-membered morpholine ring and a nucleobase (e.g., A, C, G, T, U), wherein the units are linked via non-ionic phophorodiamidate intersubunit linkages. For purposes herein, when referring to the sequence of a Morpholino oligomer, the conventional single-letter nucleobase codes (e.g., A, C, G, T, U) are used to refer to the nucleobase attached to the morpholine ring.

[0104] In exemplary aspects, the Morpholino oligomer binds to at least a portion of the sequence of SEQ ID NO: 5 of the α1A mRNA. In exemplary aspects, the Morpholino oligomer binds to at least a portion of the sequence of SEQ ID NO: 6 of the α1A mRNA. In exemplary aspects, the Morpholino oligomer binds to at least a portion of the sequence of SEQ ID NO: 7 of the α1A mRNA. In exemplary aspects, the Morpholino oligomer is complementary to at least a portion of the sequence of SEQ ID NO: 5, SEQ ID NO: 6, or SEQ ID NO: 7. The Morpholino oligomer in some aspects is complementary to at least 15 contiguous bases of said sequence. In exemplary aspects, the Morpholino oligomer comprises at least 15 contiguous bases of SEQ ID NO: 9, SEQ ID NO: 10, or SEQ ID NO: 11. In exemplary aspects, the Morpholino oligomer comprises at least 15 contiguous bases that differ by not more than 3 bases from a portion of 15 contiguous bases of SEQ ID NO: 9, SEQ ID NO: 10, or SEQ ID NO: 11. In exemplary aspects, the Morpholino oligomer comprises at least 15 contiguous bases that is at least 90% identical to a portion of 15 contiguous bases of SEQ ID NO: 9, SEQ ID NO: 10, or SEQ ID NO: 11. In exemplary aspects, the Morpholino oligomer comprises, consists essentially of, or consists of SEQ ID NO: 8.

[0105] In exemplary aspects, the Morpholino oligomer comprises the sequence of SEQ ID NO: 8. In exemplary aspects, the Morpholino oligomer comprises at least 15 contiguous bases of a sequence that (i) differs from SEQ ID NO: 8 by not more than 3 bases (e.g., not more than 4, 5, 6, 7, 8, 9, 10 bases), (ii) is at least 90% (e.g., at least 93%, at least 95%, at least 98%, at least 99%) identical to the sequence set forth in SEQ ID NO: 8, or (iii) is completely complementary to at least a portion of the sequence of SEQ ID NO: 6 or 7.

[0106] In exemplary aspects, the Morpholino oligomer binds to at least a portion of the sequence of SEQ ID NO: 56 of the α1A mRNA. In exemplary aspects, the Morpholino oligomer binds to at least a portion of the sequence of SEQ ID NO: 57 of the α1A mRNA. In exemplary aspects, the Morpholino oligomer is complementary to at least a portion of the sequence of SEQ ID NO: 56 or SEQ ID NO: 57. The Morpholino oligomer in some aspects is complementary to at least 15 contiguous bases of said sequence. In exemplary aspects, the Morpholino oligomer comprises at least 15 contiguous bases of SEQ ID NO: 58 or SEQ ID NO: 59. In exemplary aspects, the Morpholino oligomer comprises at least 15 contiguous bases that differ by not more than 3 bases from a portion of 15 contiguous bases of SEQ ID NO: 58 or SEQ ID NO: 59. In exemplary aspects, the Morpholino oligomer comprises at least 15 contiguous bases that is at least 90% identical to a portion of 15 contiguous bases of SEQ ID NO: 58 or SEQ ID NO: 59. In exemplary aspects, the Morpholino oligomer comprises, consists essentially of, or consists of SEQ ID NO: 55.

[0107] In exemplary aspects, the Morpholino oligomer comprises the sequence of SEQ ID NO: 55. In exemplary aspects, the Morpholino oligomer comprises at least 15 contiguous bases of a sequence that (i) differs from SEQ ID NO: 55 by not more than 3 bases (e.g., not more than 4, 5, 6, 7, 8, 9, 10 bases), (ii) is at least 90% (e.g., at least 93%, at least 95%, at least 98%, at least 99%) identical to the sequence set forth in SEQ ID NO: 55, or (iii) is completely complementary to at least a portion of the sequence of SEQ ID NO: 56 or 57.

[0108] Subjects

[0109] As used herein, the term “subject” is meant any living organism. In exemplary aspects, the subject is a mammal. The term “mammal” as used herein refers to any mammal, including, but not limited to, mammals of the order Rodentia, such as mice and hamsters, and mammals of the order Logomorpha, such as rabbits. It is preferred that the mammals are from the order Carnivora, including Felines (cats) and Canines (dogs). It is further preferred that the mammals are from the order Artiodactyla, including Bovines (cows) and Swines (pigs) or of the order Perssodactyla, including Equines (horses). It is further preferred that the mammals are of the order Primates, Ceboids, or Simoids (monkeys) or of the order Anthropoids (humans and apes). In exemplary aspect, the subject is a human.

[0110] In exemplary embodiments, the human has, is diagnosed with, and/or suffers from a genetic disease, including, any of those known in the art and/or described herein. In exemplary aspects, the subject has, is diagnosed with, and/or suffers from a trinucleotide repeat disorder, such as a polyglutamine disease. In exemplary aspects, the human has, is diagnosed with, and/or suffers from SCA6.

[0111] Vectors

[0112] In exemplary aspects, the IRES inhibitor is a recombinant expression vector encoding an antisense molecule described herein. Accordingly, the invention provides a recombinant expression vector comprising a nucleotide sequence encoding an antisense molecule described herein. For purposes herein, the term “recombinant expression vector” means a genetically-modified oligonucleotide or polynucleotide construct that permits the expression of a nucleic acid by a host cell, when the construct comprises a nucleotide sequence encoding the nucleic acid, and the vector is contacted with the cell under conditions sufficient to have the nucleic acid expressed within the cell. The recombinant expression vectors of the invention are not naturally-occurring as a whole. However, parts of the vectors may be naturally-occurring. The inventive recombinant expression vectors may comprise any type of nucleotides, including, but not limited to DNA and RNA, which may be single-stranded or double-stranded, synthesized or obtained in part from natural sources, and which may contain natural, non-natural or altered nucleotides. The recombinant expression vectors may comprise naturally-occurring or non-naturally-occurring internucleotide linkages, or both types of linkages. In exemplary aspects, the altered nucleotides or non-naturally occurring internucleotide linkages do not hinder the transcription or replication of the vector.

[0113] In exemplary aspects, the recombinant expression vector encodes an antisense molecule which binds to SEQ ID NO: 180. In exemplary aspects, the recombinant expression vector encodes an antisense molecule which binds to at least a portion of the sequence of SEQ ID NO: 180 of the α1A mRNA, wherein the portion is at least 5 contiguous nucleotides (or at least 2 or at least 3 contiguous nucleotides) of SEQ ID NO: 180. In exemplary aspects, the recombinant expression vector encodes an antisense molecule which binds to at least 15 contiguous nucleotides of the sequence of SEQ ID NO: 180. In exemplary aspects, the recombinant expression vector encodes an antisense molecule which binds to at least 20 contiguous nucleotides of the sequence of SEQ ID NO: 180. In exemplary aspects, the recombinant expression vector encodes an antisense molecule binds to at least 25 contiguous nucleotides of the sequence of SEQ ID NO: 180.

[0114] In exemplary aspects, the recombinant expression vector encodes an antisense molecule which is complementary to at least a portion of the sequence of SEQ ID NO: 180. In exemplary aspects, the recombinant expression vector encodes an antisense molecule which is complementary to at least 15 contiguous bases of said sequence of SEQ ID NO: 180. In exemplary aspects, the recombinant expression vector encodes an antisense molecule which is complementary to at least 20 contiguous bases of the sequence of SEQ ID NO: 180. In exemplary aspects, the recombinant expression vector encodes an antisense molecule which is complementary to at least 25 contiguous bases of the sequence of SEQ ID NO: 180. In exemplary aspects, the recombinant expression vector encodes an antisense oligonucleotide comprising at least 15 contiguous bases of SEQ ID NO: 179. In exemplary aspects, the recombinant expression vector encodes an antisense oligonucleotide comprising at least 15 contiguous bases that differs by not more than 3 bases from a portion of 15 contiguous bases of SEQ ID NO: 179. In exemplary aspects, the recombinant expression vector encodes an antisense oligonucleotide comprising at least 15 contiguous bases that is at least 90% identical to a portion of 15 contiguous bases of SEQ ID NO: 179. In exemplary aspects, the recombinant expression vector encodes an antisense oligonucleotide comprising, consisting essentially of, or consisting of SEQ ID NO: 179.

[0115] In exemplary aspects, the recombinant expression vector encodes an miRNA which targets a portion of the IRES of the CACNA1A gene wherein the portion comprises sequence of SEQ ID NO: 180. As understood by the ordinarily skilled artisan, miRNA does not require perfect pairing to its target. In exemplary aspects, the recombinant expression vector encodes an miRNA which binds to at least a portion of the sequence of SEQ ID NO: 180. In exemplary aspects, the recombinant expression vector encodes an miRNA which is complementary to at least a portion of the sequence of SEQ ID NO: 180. The recombinant expression vector encodes an miRNA which in some aspects is complementary to at least 15 contiguous bases of said sequence. In exemplary aspects, the recombinant expression vector encodes an miRNA which comprises at least 15 contiguous bases of SEQ ID NO: 179. In exemplary aspects, the recombinant expression vector encodes an miRNA which comprises at least 15 contiguous bases that differ by not more than 3 bases from a portion of 15 contiguous bases of SEQ ID NO: 179. In exemplary aspects, the recombinant expression vector encodes an miRNA which comprises at least 15 contiguous bases that is at least 90% identical to a portion of 15 contiguous bases of SEQ ID NO: 179. In exemplary aspects, the recombinant expression vector encodes an miRNA which comprises, consists essentially of, or consists of SEQ ID NO: 179. In exemplary aspects, the recombinant expression vector encodes an miRNA is about 15, about 16, about 17, about 18, about 19, about 20, about 21, about 22, about 23, about 24 nt in length.

[0116] In exemplary aspects, the recombinant expression vector encodes an miRNA comprising the sequence of SEQ ID NO: 179. In exemplary aspects, the recombinant expression vector encodes an miRNA comprising at least 15 contiguous bases of a sequence that (i) differs from SEQ ID NO: 179 by not more than 3 bases (e.g., not more than 4, 5, 6, 7, 8, 9, 10 bases), (ii) is at least 90% (e.g., at least 93%, at least 95%, at least 98%, at least 99%) identical to the sequence set forth in SEQ ID NO: 179, or (iii) is completely complementary to at least a portion of the sequence of SEQ ID NO: 180.

[0117] In exemplary aspects, the recombinant expression vector encodes an antisense molecule which is a precursor of miRNA comprising SEQ ID NO: 179. In exemplary aspects, the recombinant expression vector encodes an antisense molecule which is a primary miRNA precursor (pri-miRNA) comprising SEQ ID NO: 179 which is optionally, capped, polyadenylated, and/or comprises double-stranded stem-loop structures. In exemplary aspects, the recombinant expression vector encodes an antisense molecule which is a pre-miRNA precursor comprising SEQ ID NO: 179, which is optionally about 70 to about 100 nt long and/or comprises a hairpin structure.

[0118] In exemplary aspects, the recombinant expression vector comprises a nucleotide sequence of SEQ ID NO: 181. In exemplary aspects, the recombinant expression vector comprises a nucleotide sequence which comprises at least 15 contiguous bases of SEQ ID NO: 181. For example, the recombinant expression vector comprises a nucleotide sequence which comprises at least or about 16 contiguous bases of SEQ ID NO: 181, at least or about 17 contiguous bases of SEQ ID NO: 181, at least or about 18 contiguous bases of SEQ ID NO: 181, at least or about 19 contiguous bases of SEQ ID NO: 181, at least or about 20 contiguous bases of SEQ ID NO: 181, at least or about 21 contiguous bases of SEQ ID NO: 181, at least or about 22 contiguous bases of SEQ ID NO: 181, at least or about 23 contiguous bases of SEQ ID NO: 181, at least or about 24 contiguous bases of SEQ ID NO: 181, at least or about 25 contiguous bases of SEQ ID NO: 181, at least or about 26 contiguous bases of SEQ ID NO: 181, at least or about 27 contiguous bases of SEQ ID NO: 181, or at least or about 28 contiguous bases of SEQ ID NO: 181. In exemplary aspects, the recombinant expression vector comprises a nucleotide sequence that differs from SEQ ID NO: 181 by not more than 3 bases (e.g., not more than 4, 5, 6, 7, 8, 9, 10 bases). In exemplary aspects, the recombinant expression vector comprises a nucleotide sequence which is at least 90% (e.g., at least 93%, at least 95%, at least 98%, at least 99%) identical to the sequence of SEQ ID NO: 181.

[0119] The recombinant expression vector of the invention may be any suitable recombinant expression vector, and may be used to transform or transfect any suitable host or host cell. Suitable vectors include those designed for propagation and expansion or for expression or both, such as plasmids and viruses. The vector may be selected from the group consisting of the pUC series (Fermentas Life Sciences), the pBluescript series (Stratagene, LaJolla, Calif.), the pET series (Novagen, Madison, Wis.), the pGEX series (Pharmacia Biotech, Uppsala, Sweden), and the pEX series (Clontech, Palo Alto, Calif.). Bacteriophage vectors, such as λGTIO, λGTI 1, λZapII (Stratagene), λEMBL4, and λNM1 149, also may be used. Examples of plant expression vectors include pBIO1, pBI101.2, pBI101.3, pBI121 and pBIN19 (Clontech). Examples of animal expression vectors include pEUK-Cl, pMAM and pMAMneo (Clontech).

[0120] In exemplary aspects, the recombinant expression vector is a viral vector, e.g., a retroviral vector. In exemplary aspects, the recombinant expression vector is a cytoplasmic RNA viral vector. In exemplary aspects, the recombinant expression vector is k-borne encephalitis viral vector or a Sindbis viral vector. In exemplary aspects, the recombinant expression vector is an influenza A viral vector, an adenoviral vector, an adeno-associated vector (AAV), a lentiviral vector, an arboviral vector, an Epstein Barr viral vector, a flavivirus tick-borne encephalitis viral vector, a bovine leukemia viral vector, an human immunodeficiency viral vector, a simian immunodeficiency viral vector, a vesicular stomatitis viral vector, herpes simplex viral vector, pox viral vector, parvoviral vector, vaccinia viral vector, a gammaretroviral vector, or an alphaviral vector. In exemplary aspects, the AAV is a ssAAV8, scAAV8, ssAAV9, scAAV7, scAAV9, ssAAV2, ssAAV6, ssAAV1, ssAAV1/2, ssAAV5. In exemplary aspects, the arboviral vector is a flaviviral vector, togaviral vector, bunyaviral vector, rhabdoviral vector, or a reoviral vector. Such vectors are known in the art. See, e.g., Peng et al., Adv Drug Deliv Rev 88: 108-122 (2015); Borel et al., Mol Ther 22(4): 692-701 (2014); Usme-Ciro et al., Virol J 10: 185 (2013); Khatri et al., Crit Rev Ther Drug Carrier Syst 29(6): 487-527 (2012); Liu et al., Biochim Biophs Acta 1809(11-12): 732-745 (2011); Kay et al., Nature 7(1): 33-40 (2001); and Asgari, Viruses 6(9): 3514-3514 (2014).

[0121] In exemplary aspects, the recombinant expression vector comprises at least one element from a viral vector. In exemplary aspects, the recombinant expression vector comprises a combination of elements from different viral vectors.

[0122] In exemplary aspects, the recombinant expression vector is a non-viral synthetic vector, including any of those described in Wang et al., Adv Drug Deliv Rev 81: 142-160 (2015).

[0123] The recombinant expression vectors of the invention may be prepared using standard recombinant DNA techniques described in, for example, Sambrook et al., supra, and Ausubel et al., supra. Constructs of expression vectors, which are circular or linear, may be prepared to contain a replication system functional in a prokaryotic or eukaryotic host cell. Replication systems may be derived, e.g., from CoIE1, 2μ plasmid, λ, SV40, bovine papilloma virus, and the like.

[0124] In exemplary aspects, the recombinant expression vector comprises regulatory sequences, such as transcription and translation initiation and termination codons, which are specific to the type of host (e.g., bacterium, fungus, plant, or animal) into which the vector is to be introduced, as appropriate and taking into consideration whether the vector is DNA- or RNA-based.

[0125] The recombinant expression vector may include one or more markers or marker genes, which allow for selection of transformed or transfected hosts. Marker genes include biocide resistance, e.g., resistance to antibiotics, heavy metals, etc., complementation in an auxotrophic host to provide prototrophy, and the like. Suitable markers and marker genes for the inventive expression vectors include, for instance, His-tags, FLAG tags, green fluorescence protein genes, red fluorescence protein genes, neomycin/G418 resistance genes, hygromycin resistance genes, histidinol resistance genes, tetracycline resistance genes, and ampicillin resistance genes. In exemplary aspects, the recombinant expression vector comprises a nucleotide sequence encoding green fluorescent protein (GFP) or another fluorescent protein (e.g., red fluorescent protein (RFP), cyan fluorescent protein (CFP), yellow fluorescent protein, orange fluorescent protein, far red fluorescent protein, and the like).

[0126] The recombinant expression vector may comprise a native or non-native promoter operably linked to the nucleotide sequence encoding the antisense molecule. The selection of promoters, e.g., strong, weak, inducible, tissue-specific and developmental-specific, is within the ordinary skill of the artisan. In exemplary aspects, the recombinant expression vector comprises a non-native promoter. In exemplary aspects, the recombinant expression vector comprises a promoter which is not found upstream or near the antisense molecule in its natural environment. In exemplary aspects, the recombinant expression vector comprises a non-human promoter. The promoter in exemplary aspects is a non-viral promoter or a viral promoter, e.g., a cytomegalovirus (CMV) promoter, an SV40 promoter, an RSV promoter, and a promoter found in the long-terminal repeat of the murine stem cell virus.

[0127] In exemplary aspects, the vector is a recombinant adeno-associated viral (AAV) vector encoding an antisense molecule comprising an nucleotide sequence (e.g., an antisense molecule) which binds to a portion of an IRES of a CACNA1A gene comprising the sequence of SEQ ID NO: 180 the sequence of SEQ ID NO: 179. In exemplary aspects, the AAV vector is an AAV serotype 9 (AAV9) vector. In exemplary aspects, the recombinant AAV vector comprises one or more of a promoter, a pair of inverted terminal repeats (ITRs), and a polyadenylation signal sequence. In exemplary aspects, the promoter is a human cytomegalovirus (CMV) immediate early promoter. In exemplary aspects, the ITRs are AAV ITRs. In exemplary aspects, the polyadenylation signal sequence is an simian virus 40 (SV40) polyadenylation signal sequence. In exemplary aspects, the recombinant expression vector comprises a woodchuck hepatitis virus posttranscriptional regulatory element (WPRE). In exemplary aspects, the recombinant expression vector comprises an ITR upstream of the human CMV immediate early promoter, which is located upstream of the nucleotide sequence encoding the antisense molecule, which is located upstream of the WPRE which is located upstream of the SV40 polyadenylation signal sequence which is located upstream of the other ITR.

[0128] The inventive recombinant expression vectors may be designed for either transient expression, for stable expression, or for both. Also, the recombinant expression vectors may be made for constitutive expression or for inducible expression. Further, the recombinant expression vectors may be made to include a suicide gene. In exemplary aspects, the inventive recombinant expression vectors are designed for targeted expression. In exemplary aspects, the recombinant expression vector comprises one or more elements which cause the antisense molecule to be expressed by a specific cell population.

[0129] As used herein, the term “suicide gene” refers to a gene that causes the cell expressing the suicide gene to die. The suicide gene may be a gene that confers sensitivity to an agent, e.g., a drug, upon the cell in which the gene is expressed, and causes the cell to die when the cell is contacted with or exposed to the agent. Suicide genes are known in the art (see, for example, Suicide Gene Therapy: Methods and Reviews. Springer, Caroline J. (Maycer Research UK Centre for Maycer Therapeutics at the Institute of Maycer Research, Sutton, Surrey, UK), Humana Press, 2004) and include, for example, the Herpes Simplex Virus (HSV) thymidine kinase (TK) gene, cytosine daminase, purine nucleoside phosphorylase, and nitroreductase.

[0130] Host Cells

[0131] In exemplary aspects, the IRES inhibitor is a cell (e.g. a host cell), or a population of cells, expressing an antisense molecule described herein. In exemplary aspects, the IRES inhibitor is a host cell, or a population of host cells, comprising a recombinant expression vector encoding any of the antisense molecules described herein. Provided herein is a host cell, or a population of cells, comprising an antisense molecule described herein or an extracellular vesicle described herein. Provided herein is a cell, or a population of cells, expressing an antisense molecule described herein. Provided herein is a cell, or a population of cells, comprising a recombinant expression vector described herein. In exemplary aspects, the cell or population of cells is genetically engineered to comprise and express any one of the antisense molecules or recombinant expression vectors described herein. As used herein, the term “host cell” refers to any type of cell that may contain the antisense molecule or vector described herein. In exemplary aspects, the host cell is a eukaryotic cell, e.g., plant, animal, fungi, or algae, or may be a prokaryotic cell, e.g., bacteria or protozoa. In exemplary aspects, the host cells is a cell originating or obtained from a subject, as described herein. In exemplary aspects, the host cell originates from or is obtained from a mammal. As used herein, the term “mammal” refers to any mammal, including, but not limited to, mammals of the order Rodentia, such as mice and hamsters, and mammals of the order Logomorpha, such as rabbits. It is preferred that the mammals are from the order Carnivora, including Felines (cats) and Canines (dogs). It is more preferred that the mammals are from the order Artiodactyla, including Bo vines (cows) and S wines (pigs) or of the order Perssodactyla, including Equines (horses). It is most preferred that the mammals are of the order Primates, Ceboids, or Simoids (monkeys) or of the order Anthropoids (humans and apes). An especially preferred mammal is the human.

[0132] In exemplary aspects, the host cell is a cultured cell or a primary cell, i.e., isolated directly from an organism, e.g., a human. The host cell in exemplary aspects is an adherent cell or a suspended cell, i.e., a cell that grows in suspension. Suitable host cells are known in the art and include, for instance, DH5α E. coli cells, Chinese hamster ovarian (CHO) cells, monkey VERO cells, T293 cells, COS cells, HEK293 cells, and the like. For purposes of amplifying or replicating the recombinant expression vector, the host cell is preferably a prokaryotic cell, e.g., a DH5a cell. In exemplary aspects, the host cell is a human cell. The host cell may be of any cell type, may originate from any type of tissue, and may be of any developmental stage.

[0133] In exemplary aspects, the host cell is a mammalian, e.g., human, stem cell. In exemplary aspects, the host cell is a mammalian, e.g., human, cell of the nervous system.

[0134] Also provided by the invention is a population of cells comprising at least one host cell described herein. The population of cells may be a heterogeneous population comprising the host cell comprising any of the expression vectors described, in addition to at least one other cell, e.g., a host cell, which does not comprise any of the recombinant expression vectors. Alternatively, the population of cells may be a substantially homogeneous population, in which the population comprises mainly of host cells (e.g., consisting essentially of) comprising the expression vector. The population also may be a clonal population of cells, in which all cells of the population are clones of a single host cell comprising a recombinant expression vector, such that all cells of the population comprise the recombinant expression vector. In exemplary embodiments of the invention, the population of cells is a clonal population comprising host cells expressing a nucleic acid or a vector described herein.

[0135] Delivery Systems

[0136] In exemplary aspects, the antisense molecule is part of a delivery system, e.g., a non-viral delivery system. Delivery systems suitable for use in the methods of the present inventions and provided herein include any of those known in the art. See, e.g., Zhang et al., 2013, supra. In exemplary aspects, the delivery system is a liposome, an aptamer complex, a nanoparticle, or a dendrimer. Accordingly, the invention provides such delivery systems. The invention provides a liposome, an aptamer complex, a nanoparticle, a dendrimer, or an extracellular vesicle comprising an antisense molecule or a recombinant expression vector described herein.

[0137] In exemplary aspects, the antisense molecule is part of an aptamer-oligonucleotide conjugate. Such conjugates are described in the art. See, e.g., Liu et al., Cancer investigation 30:577-582 (2012). In exemplary aspects, the antisense molecule is part of a lipid-based delivery system, such as siPORT, MaxSuppressor, LipoTrust, each of which are commercially-available and described in the art. See, e.g., Wu et al., Molecular Pharmaceutics 8:1381-1389 (2011); Craig et al., Leukemia 26:2421-2424 (2012); Trang et al., Mol Ther 19:1116-1122 (2011); Akao et al., Cancer Gene Ther 17:398-408 (2010). In exemplary aspects, the antisense molecule is part of a lipid-based delivery system that is not commercially available, e.g., a 98N₁₂-5 delivery system (Akinc et al., Nature Biotechnology 26:561-569 (2008); a 1,2-Di-O-octadecenyl-3-trimethylammonium propane (DOTMA):cholesterol:D-alpha-tocopheryl polyethylene glycol 1000 succinate (TPGS) lipoplex (Wu et al., Molecular Pharmaceutics 8:1381-1389 (2011); a dimethyldioctadecylammonium bromide (DDAB):cholesterol:TPGS lipoplex (Piao et al., Molec Therapy 20:1261-1269 (2012); a targeted liposome-hyaluronic acid (LPH) nanoparticle (Chen et al., Mole Ther 18:1650-1656 (2010); and Liu et al., Molec Pharmaceutics 8:250-259 (2011)); an nanotransporter interfering nanoparticle-7 (iNOP-7) (Su et al., Nucleic Acids Res 39:e38 (2011)); a DC-6-140-DOPE-cholesterol liposome (Rai et al., Molec Cancer Ther 10:1720-1727 (2011)); or a solid lipid nanoparticle (Shi et al., Systemic Delivery of microRNA-34A for Cancer Stem Cell Therapy, Angewandte Chemie (2013)).

[0138] In exemplary aspects, the antisense molecule is part of a polyethyleneimine (PEI) conjugate (Ibrahim et al., Cancer Research 71:5214-5224 (2011)); a polyurethane-short brance PEI conjugate (Chiou et al., J Control Release 159:240-250 (2012); a dendrimer (e.g., a poly(amidoamine) dendrimer (Ren et al., BMC Cancer 10:27 (2010); Ren et al., J Biomater Sci Polym Ed 21:303-314 (2010)); a poly(lactide-co-glycolide) (PLGA) nanoparticle (Cheng et al., Molec Pharm 9:1481-1488 (2012); Babar et al., PNAS e1695-e1704 (2012)), a disialoganglioside-targeting silica nanoparticle or a modified ultrasmall magnetic nanoparticle (Tivnan et al., PLoS One 7:e38129 (2012); Yigit et al., Oncogene 32, 1530-1538 (2013)).

[0139] In exemplary aspects, the antisense molecule is part of an extracellular vesicle, such as e.g., an exosome. Such vesicles for delivery of small RNA molecules are described in Hagiwara et al., Drug Deliv and Transl Res 4: 31-37 (2014); Momen-Heravi et al., Nature Scientific Reports 5: 09991 (2015); Wang et al., Asian PAc J Cancer Prev 16(10): 4203-4209 (2015); and International Application Publication No. WO/2014/028763; and include any vesicle in the extracellular space. In exemplary aspects, the extracellular vesicle is an exosome. In exemplary aspects, the exosome is 40-100 nm in diameter and are derived from multivescicular endosomes. In exemplary aspects, the extracellular vesicle is a microvesicle. In exemplary aspects, the microvesicle is 50-1000 nm in diameter and is generated by budding at the plasma membrane.

[0140] The present invention provides a liposome, aptamer complex, nanoparticle, dendrimer, or extracellular vesicle comprising an antisense molecule, e.g., an miRNA, which targets a portion of the IRES of the CACNA1A gene wherein the portion comprises sequence of SEQ ID NO: 180. In exemplary aspects, the liposome, aptamer complex, nanoparticle, dendrimer, or extracellular vesicle comprises an antisense molecule, e.g., miRNA, which binds to at least a portion of the sequence of SEQ ID NO: 180. In exemplary aspects, the liposome, aptamer complex, nanoparticle, dendrimer, or extracellular vesicle comprises an antisense molecule, e.g., an miRNA, which is complementary to at least a portion of the sequence of SEQ ID NO: 180. The antisense molecule, e.g., miRNA, in some aspects is complementary to at least 15 contiguous bases of said sequence. In exemplary aspects, the liposome, aptamer complex, nanoparticle, dendrimer, or extracellular vesicle comprises an antisense molecule, e.g., miRNA, which comprises at least 15 contiguous bases of SEQ ID NO: 179. In exemplary aspects, the liposome, aptamer complex, nanoparticle, dendrimer, or extracellular vesicle comprises an antisense molecule, e.g., miRNA, which comprises at least 15 contiguous bases that differ by not more than 3 bases from a portion of 15 contiguous bases of SEQ ID NO: 179. In exemplary aspects, the liposome, aptamer complex, nanoparticle, dendrimer, or extracellular vesicle comprises an antisense molecule, e.g., miRNA, which comprises at least 15 contiguous bases that is at least 90% identical to a portion of 15 contiguous bases of SEQ ID NO: 179. In exemplary aspects, the liposome, aptamer complex, nanoparticle, dendrimer, or extracellular vesicle comprises an antisense molecule, e.g., miRNA, which comprises, consists essentially of, or consists of SEQ ID NO: 179. In exemplary aspects, the miRNA is about 15, about 16, about 17, about 18, about 19, about 20, about 21, about 22, about 23, about 24 nt in length.

[0141] In exemplary aspects, the liposome, aptamer complex, nanoparticle, dendrimer, or extracellular vesicle comprises an antisense molecule, which is a precursor of miRNA comprising SEQ ID NO: 179. In exemplary aspects, the antisense molecule is a primary miRNA precursor (pri-miRNA) comprising SEQ ID NO: 179 which is optionally, capped, polyadenylated, and/or comprises double-stranded stem-loop structures. In exemplary aspects, the liposome, aptamer complex, nanoparticle, dendrimer, or extracellular vesicle comprises an antisense molecule, which is a pre-miRNA precursor comprising SEQ ID NO: 179, which is optionally about 70 to about 100 nt long and/or comprises a hairpin structure.

[0142] In exemplary aspects, the liposome, aptamer complex, nanoparticle, dendrimer, or extracellular vesicle comprises an antisense molecule, e.g., miRNA, comprising the sequence of SEQ ID NO: 179. In exemplary aspects, the liposome, aptamer complex, nanoparticle, dendrimer, or extracellular vesicle comprises an antisense molecule, e.g., miRNA, comprising at least 15 contiguous bases of a sequence that (i) differs from SEQ ID NO: 179 by not more than 3 bases (e.g., not more than 4, 5, 6, 7, 8, 9, 10 bases), (ii) is at least 90% (e.g., at least 93%, at least 95%, at least 98%, at least 99%) identical to the sequence set forth in SEQ ID NO: 179, or (iii) is completely complementary to at least a portion of the sequence of SEQ ID NO: 180.

[0143] In exemplary aspects, the liposome, aptamer complex, nanoparticle, dendrimer, or extracellular vesicle comprises a recombinant expression vector comprising a nucleotide sequence of SEQ ID NO: 181. In exemplary aspects, the liposome, aptamer complex, nanoparticle, dendrimer, or extracellular vesicle comprises a recombinant expression vector comprising a nucleotide sequence which comprises at least 15 contiguous bases of SEQ ID NO: 181. For example, the recombinant expression vector comprises a nucleotide sequence which comprises at least or about 16 contiguous bases of SEQ ID NO: 181, at least or about 17 contiguous bases of SEQ ID NO: 181, at least or about 18 contiguous bases of SEQ ID NO: 181, at least or about 19 contiguous bases of SEQ ID NO: 181, at least or about 20 contiguous bases of SEQ ID NO: 181, at least or about 21 contiguous bases of SEQ ID NO: 181, at least or about 22 contiguous bases of SEQ ID NO: 181, at least or about 23 contiguous bases of SEQ ID NO: 181, at least or about 24 contiguous bases of SEQ ID NO: 181, at least or about 25 contiguous bases of SEQ ID NO: 181, at least or about 26 contiguous bases of SEQ ID NO: 181, at least or about 27 contiguous bases of SEQ ID NO: 181, or at least or about 28 contiguous bases of SEQ ID NO: 181. In exemplary aspects, the liposome, aptamer complex, nanoparticle, dendrimer, or extracellular vesicle comprises a recombinant expression vector comprising a nucleotide sequence that differs from SEQ ID NO: 181 by not more than 3 bases (e.g., not more than 4, 5, 6, 7, 8, 9, 10 bases). In exemplary aspects, the liposome, aptamer complex, nanoparticle, dendrimer, or extracellular vesicle comprises a recombinant expression vector comprising a nucleotide sequence which is at least 90% (e.g., at least 93%, at least 95%, at least 98%, at least 99%) identical to the sequence of SEQ ID NO: 181.

[0144] Antisense Molecules and Pharmaceutical Compositions Comprising the Same

[0145] The invention also provides any of the aforementioned IRES inhibitors. In this regard, the invention provides any of the aforementioned antisense molecules, e.g., antisense oligonucleotides, antisense nucleic acid analogs, suitable for use in the inventive methods. For purposes herein, in some aspects, the IRES inhibitor, e.g., antisense molecule, is isolated, purified, or not naturally-occurring or synthetic. The term “isolated” as used herein means having been removed from its natural environment. The term “purified” as used herein means having been increased in purity, wherein “purity” is a relative term, and not to be necessarily construed as absolute purity. As used herein, the term “not naturally-occurring” refers to a molecule or compound which is not found in nature or is non-natural. An IRES inhibitor which is not naturally-occurring is “non-naturally occurring.” In exemplary aspects, an IRES inhibitor which is not naturally-occurring comprises at least one component which is not found in nature. The non-natural IRES inhibitor may comprise one or more naturally-occurring components but comprises at least one component which is not found in nature. The non-naturally occurring IRES inhibitor in some aspects comprises only naturally occurring components, but the overall structure or arrangement of the components is not found in nature. It is preferred that no insertions, deletions, inversions, and/or substitutions are present in the antisense molecules of the invention. However, it may be suitable to comprise one or more insertions, deletions, inversions, and/or substitutions. In exemplary aspects, the antisense molecule comprises a detectable label, such as, for instance, a radioisotope, a fluorophore, or an element particle.

[0146] The antisense molecules of the invention can be constructed based on chemical synthesis and/or enzymatic ligation reactions using procedures known in the art. See, for example, Sambrook et al., Molecular Cloning: A Laboratory Manual, 3^{rd} Ed., Cold Spring Harbor Press, Cold Spring Harbor, N.Y. (2001) and Ausubel et al., Current Protocols in Molecular Biology, Greene Publishing Associates and John Wiley & Sons, New York, N.Y. (1994). For example, an antisense molecule can be chemically synthesized using naturally occurring nucleotides or variously modified nucleotides designed to increase the biological stability of the molecules or to increase the physical stability of the duplex formed upon hybridization (e.g., phosphorothioate derivatives and acridine substituted nucleotides).

[0147] In exemplary aspects, the IRES inhibitor, e.g., antisense molecule, is formulated with one or more pharmaceutically acceptable carriers, diluents, and/or excipients and is provided as part of a pharmaceutical composition. In this regard, the invention further provides a pharmaceutical composition comprising any of the IRES inhibitors, e.g., antisense molecules, described herein. The pharmaceutical composition comprises one or more pharmaceutically acceptable carriers, diluents, and/or excipients, and is preferably sterile.

[0148] Depending on the route of administration, the particular IRES inhibitor intended for use, as well as other factors, the pharmaceutical composition may comprise additional pharmaceutically acceptable ingredients, including, for example, acidifying agents, additives, adsorbents, aerosol propellants, air displacement agents, alkalizing agents, anticaking agents, anticoagulants, antimicrobial preservatives, antioxidants, antiseptics, bases, binders, buffering agents, chelating agents, coating agents, coloring agents, desiccants, detergents, diluents, disinfectants, disintegrants, dispersing agents, dissolution enhancing agents, dyes, emollients, emulsifying agents, emulsion stabilizers, fillers, film forming agents, flavor enhancers, flavoring agents, flow enhancers, gelling agents, granulating agents, humectants, lubricants, mucoadhesives, ointment bases, ointments, oleaginous vehicles, organic bases, pastille bases, pigments, plasticizers, polishing agents, preservatives, sequestering agents, skin penetrants, solubilizing agents, solvents, stabilizing agents, suppository bases, surface IRES inhibitors, surfactants, suspending agents, sweetening agents, therapeutic agents, thickening agents, tonicity agents, toxicity agents, viscosity-increasing agents, water-absorbing agents, water-miscible cosolvents, water softeners, or wetting agents.

[0149] Accordingly, in some embodiments, the pharmaceutical composition comprises any one or a combination of the following components: acacia, acesulfame potassium, acetyltributyl citrate, acetyltriethyl citrate, agar, albumin, alcohol, dehydrated alcohol, denatured alcohol, dilute alcohol, aleuritic acid, alginic acid, aliphatic polyesters, alumina, aluminum hydroxide, aluminum stearate, amylopectin, α-amylose, ascorbic acid, ascorbyl palmitate, aspartame, bacteriostatic water for injection, bentonite, bentonite magma, benzalkonium chloride, benzethonium chloride, benzoic acid, benzyl alcohol, benzyl benzoate, bronopol, butylated hydroxyanisole, butylated hydroxytoluene, butylparaben, butylparaben sodium, calcium alginate, calcium ascorbate, calcium carbonate, calcium cyclamate, dibasic anhydrous calcium phosphate, dibasic dehydrate calcium phosphate, tribasic calcium phosphate, calcium propionate, calcium silicate, calcium sorbate, calcium stearate, calcium sulfate, calcium sulfate hemihydrate, canola oil, carbomer, carbon dioxide, carboxymethyl cellulose calcium, carboxymethyl cellulose sodium, β-carotene, carrageenan, castor oil, hydrogenated castor oil, cationic emulsifying wax, cellulose acetate, cellulose acetate phthalate, ethyl cellulose, microcrystalline cellulose, powdered cellulose, silicified microcrystalline cellulose, sodium carboxymethyl cellulose, cetostearyl alcohol, cetrimide, cetyl alcohol, chlorhexidine, chlorobutanol, chlorocresol, cholesterol, chlorhexidine acetate, chlorhexidine gluconate, chlorhexidine hydrochloride, chlorodifluoroethane (HCFC), chlorodifluoromethane, chlorofluorocarbons (CFC)chlorophenoxyethanol, chloroxylenol, corn syrup solids, anhydrous citric acid, citric acid monohydrate, cocoa butter, coloring agents, corn oil, cottonseed oil, cresol, m-cresol, o-cresol, p-cresol, croscarmellose sodium, crospovidone, cyclamic acid, cyclodextrins, dextrates, dextrin, dextrose, dextrose anhydrous, diazolidinyl urea, dibutyl phthalate, dibutyl sebacate, diethanolamine, diethyl phthalate, difluoroethane (HFC), dimethyl-β-cyclodextrin, cyclodextrin-type compounds such as Captisol®, dimethyl ether, dimethyl phthalate, dipotassium edentate, disodium edentate, disodium hydrogen phosphate, docusate calcium, docusate potassium, docusate sodium, dodecyl gallate, dodecyltrimethylammonium bromide, edentate calcium disodium, edtic acid, eglumine, ethyl alcohol, ethylcellulose, ethyl gallate, ethyl laurate, ethyl maltol, ethyl oleate, ethylparaben, ethylparaben potassium, ethylparaben sodium, ethyl vanillin, fructose, fructose liquid, fructose milled, fructose pyrogen-free, powdered fructose, fumaric acid, gelatin, glucose, liquid glucose, glyceride mixtures of saturated vegetable fatty acids, glycerin, glyceryl behenate, glyceryl monooleate, glyceryl monostearate, self-emulsifying glyceryl monostearate, glyceryl palmitostearate, glycine, glycols, glycofurol, guar gum, heptafluoropropane (HFC), hexadecyltrimethylammonium bromide, high fructose syrup, human serum albumin, hydrocarbons (HC), dilute hydrochloric acid, hydrogenated vegetable oil, type II, hydroxyethyl cellulose, 2-hydroxyethyl-β-cyclodextrin, hydroxypropyl cellulose, low-substituted hydroxypropyl cellulose, 2-hydroxypropyl-β-cyclodextrin, hydroxypropyl methylcellulose, hydroxypropyl methylcellulose phthalate, imidurea, indigo carmine, ion exchangers, iron oxides, isopropyl alcohol, isopropyl myristate, isopropyl palmitate, isotonic saline, kaolin, lactic acid, lactitol, lactose, lanolin, lanolin alcohols, anhydrous lanolin, lecithin, magnesium aluminum silicate, magnesium carbonate, normal magnesium carbonate, magnesium carbonate anhydrous, magnesium carbonate hydroxide, magnesium hydroxide, magnesium lauryl sulfate, magnesium oxide, magnesium silicate, magnesium stearate, magnesium trisilicate, magnesium trisilicate anhydrous, malic acid, malt, maltitol, maltitol solution, maltodextrin, maltol, maltose, mannitol, medium chain triglycerides, meglumine, menthol, methylcellulose, methyl methacrylate, methyl oleate, methylparaben, methylparaben potassium, methylparaben sodium, microcrystalline cellulose and carboxymethylcellulose sodium, mineral oil, light mineral oil, mineral oil and lanolin alcohols, oil, olive oil, monoethanolamine, montmorillonite, octyl gallate, oleic acid, palmitic acid, paraffin, peanut oil, petrolatum, petrolatum and lanolin alcohols, pharmaceutical glaze, phenol, liquified phenol, phenoxyethanol, phenoxypropanol, phenylethyl alcohol, phenylmercuric acetate, phenylmercuric borate, phenylmercuric nitrate, polacrilin, polacrilin potassium, poloxamer, polydextrose, polyethylene glycol, polyethylene oxide, polyacrylates, polyethylene-polyoxypropylene-block polymers, polymethacrylates, polyoxyethylene alkyl ethers, polyoxyethylene castor oil derivatives, polyoxyethylene sorbitol fatty acid esters, polyoxyethylene stearates, polyvinyl alcohol, polyvinyl pyrrolidone, potassium alginate, potassium benzoate, potassium bicarbonate, potassium bisulfite, potassium chloride, postassium citrate, potassium citrate anhydrous, potassium hydrogen phosphate, potassium metabisulfite, monobasic potassium phosphate, potassium propionate, potassium sorbate, povidone, propanol, propionic acid, propylene carbonate, propylene glycol, propylene glycol alginate, propyl gallate, propylparaben, propylparaben potassium, propylparaben sodium, protamine sulfate, rapeseed oil, Ringer's solution, saccharin, saccharin ammonium, saccharin calcium, saccharin sodium, safflower oil, saponite, serum proteins, sesame oil, colloidal silica, colloidal silicon dioxide, sodium alginate, sodium ascorbate, sodium benzoate, sodium bicarbonate, sodium bisulfite, sodium chloride, anhydrous sodium citrate, sodium citrate dehydrate, sodium chloride, sodium cyclamate, sodium edentate, sodium dodecyl sulfate, sodium lauryl sulfate, sodium metabisulfite, sodium phosphate, dibasic, sodium phosphate, monobasic, sodium phosphate, tribasic, anhydrous sodium propionate, sodium propionate, sodium sorbate, sodium starch glycolate, sodium stearyl fumarate, sodium sulfite, sorbic acid, sorbitan esters (sorbitan fatty esters), sorbitol, sorbitol solution 70%, soybean oil, spermaceti wax, starch, corn starch, potato starch, pregelatinized starch, sterilizable maize starch, stearic acid, purified stearic acid, stearyl alcohol, sucrose, sugars, compressible sugar, confectioner's sugar, sugar spheres, invert sugar, Sugartab, Sunset Yellow FCF, synthetic paraffin, talc, tartaric acid, tartrazine, tetrafluoroethane (HFC), theobroma oil, thimerosal, titanium dioxide, alpha tocopherol, tocopheryl acetate, alpha tocopheryl acid succinate, beta-tocopherol, delta-tocopherol, gamma-tocopherol, tragacanth, triacetin, tributyl citrate, triethanolamine, triethyl citrate, trimethyl-β-cyclodextrin, trimethyltetradecylammonium bromide, tris buffer, trisodium edentate, vanillin, type I hydrogenated vegetable oil, water, soft water, hard water, carbon dioxide-free water, pyrogen-free water, water for injection, sterile water for inhalation, sterile water for injection, sterile water for irrigation, waxes, anionic emulsifying wax, carnauba wax, cationic emulsifying wax, cetyl ester wax, microcrystalline wax, nonionic emulsifying wax, suppository wax, white wax, yellow wax, white petrolatum, wool fat, xanthan gum, xylitol, zein, zinc propionate, zinc salts, zinc stearate, or any excipient in the Handbook of Pharmaceutical Excipients, Third Edition, A. H. Kibbe (Pharmaceutical Press, London, U K, 2000), which is incorporated by reference in its entirety. Remington's Pharmaceutical Sciences, Sixteenth Edition, E. W. Martin (Mack Publishing Co., Easton, Pa., 1980), which is incorporated by reference in its entirety, discloses various components used in formulating pharmaceutically acceptable compositions and known techniques for the preparation thereof. Except insofar as any conventional agent is incompatible with the pharmaceutical compositions, its use in pharmaceutical compositions is contemplated. Supplementary active ingredients also can be incorporated into the compositions.

[0150] The pharmaceutical compositions may be formulated to achieve a physiologically compatible pH. In some embodiments, the pH of the pharmaceutical composition may be at least 5, at least 5.5, at least 6, at least 6.5, at least 7, at least 7.5, at least 8, at least 8.5, at least 9, at least 9.5, at least 10, or at least 10.5 up to and including pH 11, depending on the formulation and route of administration. In certain embodiments, the pharmaceutical compositions may comprise buffering agents to achieve a physiological compatible pH. The buffering agents may include any compounds capabale of buffering at the desired pH such as, for example, phosphate buffers (e.g., PBS), triethanolamine, Tris, bicine, TAPS, tricine, HEPES, TES, MOPS, PIPES, cacodylate, MES, and others.

[0151] Routes of Administration

[0152] With regard to the invention, the IRES inhibitor, pharmaceutical composition comprising the same, may be administered to the subject via any suitable route of administration. The following discussion on routes of administration is merely provided to illustrate exemplary embodiments and should not be construed as limiting the scope in any way.

[0153] Formulations suitable for oral administration can consist of (a) liquid solutions, such as an effective amount of the IRES inhibitor of the present invention dissolved in diluents, such as water, saline, or orange juice; (b) capsules, sachets, tablets, lozenges, and troches, each containing a predetermined amount of the active ingredient, as solids or granules; (c) powders; (d) suspensions in an appropriate liquid; and (e) suitable emulsions. Liquid formulations may include diluents, such as water and alcohols, for example, ethanol, benzyl alcohol, and the polyethylene alcohols, either with or without the addition of a pharmaceutically acceptable surfactant. Capsule forms can be of the ordinary hard- or soft-shelled gelatin type containing, for example, surfactants, lubricants, and inert fillers, such as lactose, sucrose, calcium phosphate, and corn starch. Tablet forms can include one or more of lactose, sucrose, mannitol, corn starch, potato starch, alginic acid, microcrystalline cellulose, acacia, gelatin, guar gum, colloidal silicon dioxide, croscarmellose sodium, talc, magnesium stearate, calcium stearate, zinc stearate, stearic acid, and other excipients, colorants, diluents, buffering agents, disintegrating agents, moistening agents, preservatives, flavoring agents, and other pharmacologically compatible excipients. Lozenge forms can comprise the IRES inhibitor of the present invention in a flavor, usually sucrose and acacia or tragacanth, as well as pastilles comprising the IRES inhibitor of the present invention in an inert base, such as gelatin and glycerin, or sucrose and acacia, emulsions, gels, and the like containing, in addition to, such excipients as are known in the art.

[0154] The IRES inhibitor s of the present invention, alone or in combination with other suitable components, can be delivered via pulmonary administration and can be made into aerosol formulations to be administered via inhalation. These aerosol formulations can be placed into pressurized acceptable propellants, such as dichlorodifluoromethane, propane, nitrogen, and the like. They also may be formulated as pharmaceuticals for non-pressured preparations, such as in a nebulizer or an atomizer. Such spray formulations also may be used to spray mucosa. In some embodiments, the IRES inhibitor is formulated into a powder blend or into microparticles or nanoparticles. Suitable pulmonary formulations are known in the art. See, e.g., Qian et al., Int J Pharm 366: 218-220 (2009); Adjei and Garren, Pharmaceutical Research, 7(6): 565-569 (1990); Kawashima et al., J Controlled Release 62(1-2): 279-287 (1999); Liu et al., Pharm Res 10(2): 228-232 (1993); International Patent Application Publication Nos. WO 2007/133747 and WO 2007/141411.

[0155] Formulations suitable for parenteral administration include aqueous and non-aqueous, isotonic sterile injection solutions, which can contain anti-oxidants, buffers, bacteriostats, and solutes that render the formulation isotonic with the blood of the intended recipient, and aqueous and non-aqueous sterile suspensions that can include suspending agents, solubilizers, thickening agents, stabilizers, and preservatives. The term, “parenteral” means not through the alimentary canal but by some other route such as subcutaneous, intramuscular, intraspinal, or intravenous. The IRES inhibitor of the present invention can be administered with a physiologically acceptable diluent in a pharmaceutical carrier, such as a sterile liquid or mixture of liquids, including water, saline, aqueous dextrose and related sugar solutions, an alcohol, such as ethanol or hexadecyl alcohol, a glycol, such as propylene glycol or polyethylene glycol, dimethylsulfoxide, glycerol, ketals such as 2,2-dimethyl-153-dioxolane-4-methanol, ethers, poly(ethyleneglycol) 400, oils, fatty acids, fatty acid esters or glycerides, or acetylated fatty acid glycerides with or without the addition of a pharmaceutically acceptable surfactant, such as a soap or a detergent, suspending agent, such as pectin, carbomers, methylcellulose, hydroxypropylmethylcellulose, or carboxymethylcellulose, or emulsifying agents and other pharmaceutical adjuvants.

[0156] Oils, which can be used in parenteral formulations include petroleum, animal, vegetable, or synthetic oils. Specific examples of oils include peanut, soybean, sesame, cottonseed, corn, olive, petrolatum, and mineral. Suitable fatty acids for use in parenteral formulations include oleic acid, stearic acid, and isostearic acid. Ethyl oleate and isopropyl myristate are examples of suitable fatty acid esters.

[0157] The parenteral formulations in some embodiments contain from about 0.5% to about 25% by weight of the IRES inhibitor of the present invention in solution. Preservatives and buffers may be used. In order to minimize or eliminate irritation at the site of injection, such compositions may contain one or more nonionic surfactants having a hydrophile-lipophile balance (HLB) of from about 12 to about 17. The quantity of surfactant in such formulations will typically range from about 5% to about 15% by weight. Suitable surfactants include polyethylene glycol sorbitan fatty acid esters, such as sorbitan monooleate and the high molecular weight adducts of ethylene oxide with a hydrophobic base, formed by the condensation of propylene oxide with propylene glycol. The parenteral formulations in some aspects are presented in unit-dose or multi-dose sealed containers, such as ampoules and vials, and can be stored in a freeze-dried (lyophilized) condition requiring only the addition of the sterile liquid excipient, for example, water, for injections, immediately prior to use. Extemporaneous injection solutions and suspensions in some aspects are prepared from sterile powders, granules, and tablets of the kind previously described.

[0158] Injectable formulations are in accordance with the invention. The requirements for effective pharmaceutical carriers for injectable compositions are well-known to those of ordinary skill in the art (see, e.g., Pharmaceutics and Pharmacy Practice, J. B. Lippincott Company, Philadelphia, Pa., Banker and Chalmers, eds., pages 238-250 (1982), and ASHP Handbook on Injectable Drugs, Toissel, 4th ed., pages 622-630 (1986)).

[0159] Additionally, the IRES inhibitors of the invention can be made into suppositories for rectal administration by mixing with a variety of bases, such as emulsifying bases or water-soluble bases. Formulations suitable for vaginal administration can be presented as pessaries, tampons, creams, gels, pastes, foams, or spray formulas containing, in addition to the active ingredient, such carriers as are known in the art to be appropriate.

[0160] It will be appreciated by one of skill in the art that, in addition to the above-described pharmaceutical compositions, the IRES inhibitor of the invention can be formulated as inclusion complexes, such as cyclodextrin inclusion complexes, or liposomes.

[0161] In exemplary aspects, wherein the IRES inhibitor is an antisense molecule, the antisense molecule may be formulated into a viral vector or a nonviral vector, either of which are suitable for delivery into humans. Li et al., Cancer Gene Ther 8:555-565 (2001) describes methods of targeted gene therapy by non viral vectors. Chen et al., Mol Ther describes gene therapy with a lentiviral gene delivery construct. Zhou et al., J Healthc Eng 4(2): 223-254 (2013) and Chen et al., Cardiovasc Ultrasound 11:11 (2013) describes gene deliver with ultrasound. See, e.g., Chistiakov et al., Drug Deliv 19(8): 392-405 (2012) and Juliano et al., J Drug Target 21(1): 27-43(2013) and Southwell et al., Trends Mol Med 18(11): 634-643 (2012) and International Patent Application Publication Nos. WO2005/072703, WO1994/023699; WO2010/085665, and WO1998/018811. Examples 8 and 9 describe delivery of an exemplary miRNA through delivery of an adenoviral vector.

[0162] Dosages

[0163] For purposes herein, the amount or dose of the IRES inhibitor administered should be sufficient to effect, e.g., a therapeutic or prophylactic response, in the subject or animal over a reasonable time frame. For example, the dose of the IRES inhibitor of the present invention should be sufficient to treat SCA6 as described herein in a period of from about 1 to 4 minutes, 1 to 4 hours or 1 to 4 weeks or longer, e.g., 5 to 20 or more weeks, from the time of administration. In certain embodiments, the time period could be even longer. The dose will be determined by the efficacy of the particular IRES inhibitor and the condition of the animal (e.g., human), as well as the body weight of the animal (e.g., human) to be treated.

[0164] Many assays for determining an administered dose are known in the art. For purposes herein, an assay, which comprises comparing the extent to which SCA6 is treated upon administration of a given dose of the IRES inhibitor of the present invention to a mammal among a set of mammals, each set of which is given a different dose of the IRES inhibitor, could be used to determine a starting dose to be administered to a mammal. The extent to which SCA6 is treated upon administration of a certain dose can be represented by, for example, the extent to which the expression of α1ACT is reduced. Methods of measuring protein expression are known in the art, including, for instance, the methods described in the EXAMPLES set forth below.

[0165] The dose of the IRES inhibitor of the present invention also will be determined by the existence, nature and extent of any adverse side effects that might accompany the administration of a particular IRES inhibitor of the present invention. Typically, the attending physician will decide the dosage of the IRES inhibitor of the present invention with which to treat each individual patient, taking into consideration a variety of factors, such as age, body weight, general health, diet, sex, IRES inhibitor of the present invention to be administered, route of administration, and the severity of the condition being treated. By way of example and not intending to limit the scope of the claimed subject matter, the dose of the IRES inhibitor of the present invention can be about 0.0001 to about 1 g/kg body weight of the subject being treated/day, from about 0.0001 to about 0.001 g/kg body weight/day, or about 0.01 mg to about 1 g/kg body weight/day.

[0166] Controlled Release Formulations

[0167] In some embodiments, the IRES inhibitors described herein can be modified into a depot form, such that the manner in which the IRES inhibitor is released into the body to which it is administered is controlled with respect to time and location within the body (see, for example, U.S. Pat. No. 4,450,150). Depot forms of IRES inhibitors of the invention can be, for example, an implantable composition comprising the IRES inhibitors and a porous or non-porous material, such as a polymer, wherein the IRES inhibitor is encapsulated by or diffused throughout the material and/or degradation of the non-porous material. The depot is then implanted into the desired location within the body of the subject and the IRES inhibitor is released from the implant at a predetermined rate.

[0168] The pharmaceutical composition comprising the IRES inhibitor in certain aspects is modified to have any type of in vivo release profile. In some aspects, the pharmaceutical composition is an immediate release, controlled release, sustained release, extended release, delayed release, or bi-phasic release formulation. Methods of formulating small molecular weight compounds, peptides, and oligonucleotides or nucleic acid analogs, for controlled release are known in the art. See, for example, Qian et al., J Pharm 374: 46-52 (2009) and International Patent Application Publication Nos. WO 2008/130158, WO2004/033036; WO2000/032218; and WO 1999/040942.

[0169] The instant compositions may further comprise, for example, micelles or liposomes, or some other encapsulated form, or may be administered in an extended release form to provide a prolonged storage and/or delivery effect.

[0170] Timing of Administration

[0171] The disclosed pharmaceutical compositions and formulations may be administered according to any regimen including, for example, daily (1 time per day, 2 times per day, 3 times per day, 4 times per day, 5 times per day, 6 times per day), every two days, every three days, every four days, every five days, every six days, weekly, bi-weekly, every three weeks, monthly, or bi-monthly. Timing, like dosing can be fine-tuned based on dose-response studies, efficacy, and toxicity data, and initially gauged based on timing used for other antibody therapeutics.

[0172] Combinations

[0173] In some embodiments, the IRES inhibitors described herein are administered alone, and in alternative embodiments, the IRES inhibitors described herein are administered in combination with another therapeutic agent, e.g., another IRES inhibitor of the invention of different type (e.g., structure) or a completely different therapeutic agent.

[0174] In exemplary aspects, the IRES inhibitors described herein are administered in combination with a compound which targets one of the following genes: Bcat1, Bdkrb2, Bmp3, Ces1a, Chst1, Crabp1, Dapk1, Dbh, Foxq1, Gabbr2, Gfra1, Gnai1, Hsd11b1, IL17re, Iqsec3, Mb21d2, Mmp13, Nnat, Npy1r, Ntn1, Pmp22, Podx1, Prkcdbp, Ramp1, Rbp4, Reep1, Rgs10, S100a4, S100a5, S100a6, Sema3b, Sgce, Sh3bgr, Smoc2, Tbc1d9, Ugt8, Vldlr. The mRNA encoded by each of these genes are provided in the Sequence Listing as SEQ ID NOs: 64-137. In exemplary aspects, the IRES inhibitors described herein are administered in combination with a compound which targets a gene product encoded by one of these genes.

[0175] In alternative or additional aspects, the IRES inhibitors described herein are administered in combination with a compound which targets one of the following genes, which are related to neuron differentiation: Vgf, Ntn1, Slc11a, Lhx2, Nrp1, Mab2, Ret, Etv4, Btg2, Cspg5, Sptbn4, Rab3a, Lamb2, Celsr3, Ntrk1, Mapk8ip3, Cln8, Nnat, Bmp7, Brsk1, Sema5a, Plxna3, Fgfr1. In exemplary aspects, the IRES inhibitors described herein are administered in combination with a compound which targets a gene product encoded by one of these genes.

[0176] In alternative or additional aspects, the IRES inhibitors described herein are administered in combination with a compound which targets one of the following genes, which are related to the cell cycle: Suv39h2, Ndc80, Rad51, Trip13, Cenpf, Ccnb1, SMC4, SMC2, Kif11, Cep55, Kif18a, Dlgap5, Lzts2, Katna1, Mih1, Mns1, Rps6. In exemplary aspects, the IRES inhibitors described herein are administered in combination with a compound that targets a gene product encoded by one of these genes.

[0177] In addition to the inventive methods comprising administering an IRES inhibitor, provided herein are alternative methods of treating SCA6 in a subject, comprising the step of administering to the subject (I) a compound which targets one or more genes other than the CACNA1A gene, wherein the one or more genes is selected from the group consisting of: Bcat1, Bdkrb2, Bmp3, Ces1a, Chst1, Crabp1, Dapk1, Dbh, Foxq1, Gabbr2, Gfra1, Gnai1, Hsd11b1, IL17re, Iqsec3, Mb21d2, Mmp13, Nnat, Npy1r, Ntn1, Pmp22, Podx1, Prkcdbp, Ramp1, Rbp4, Reep1, Rgs10, S100a4, S100a5, S100a6, Sema3b, Sgce, Sh3bgr, Smoc2, Tbc1d9, Ugt8, Vldlr, Vgf, Ntn1, Slc11a, Lhx2, Nrp1, Mab2, Ret, Etv4, Btg2, Cspg5, Sptbn4, Rab3a, Lamb2, Celsr3, Ntrk1, Mapk8ip3, Cln8, Nnat, Bmp7, Brsk1, Sema5a, Plxna3, Fgfr1, Suv39h2, Ndc80, Rad51, Trip13, Cenpf, Ccnb1, SMC4, SMC2, Kif11, Cep55, Kif18a, Dlgap5, Lzts2, Katna1, Mih1, Mns1, and Rps6, or (II) a compound which targets a gene product encoded by said gene.

[0178] Kits

[0179] In some embodiments, the IRES inhibitor is provided as part of a kit or package or unit dose. “Unit dose” is a discrete amount of a therapeutic composition dispersed in a suitable carrier. Accordingly, provided herein are kits comprising an IRES inhibitor of the invention. In exemplary aspects, the kit comprises an antisense molecule as described herein.

[0180] In some embodiments, the components of the kit/unit dose are packaged with instructions for administration to a subject. In some embodiments, the kit comprises one or more devices for administration to a subject, e.g., a needle and syringe, a dropper, a measuring spoon or cup or like device, an inhaler, and the like. In some aspects, the IRES inhibitor is pre-packaged in a ready to use form, e.g., a syringe, an intravenous bag, an inhaler, a tablet, capsule, etc. In some aspects, the kit further comprises other therapeutic or diagnostic agents or pharmaceutically acceptable carriers (e.g., solvents, buffers, diluents, etc.), including any of those described herein. In particular aspects, the kit comprises an IRES inhibitor of the invention along with the current SCA6 standard of care.

[0181] The following examples further illustrate the invention but, of course, should not be construed as in any way limiting its scope.

### EXAMPLES

### Example 1

[0182] This example demonstrates an miRNA-mediated therapy for SCA6 which provides a selective translational block of the CACNA1A second cistron.

[0183] Spinocerebellar ataxia type 6 (SCA6) is a dominantly-inherited neurodegenerative disease characterized by progressive ataxia and Purkinje cell degeneration and caused by abnormal expansions of the polyglutamine (polyQ) tract in CACNA1A. Recently, it was discovered that SCA6 is attributable to the expression of a polyQ repeat expansion within a second CACNA1A gene product, α1ACT and α1ACT expression is under the control of internal ribosomal entry site (IRES) within the CACNA1A gene coding region. Here it is shown that miR-3191-5p bound to Argonaute protein-4 preferentially inhibits the translational initiation of α1ACT by eukaryotic initiation factors, eIF4AII and eIF4GII, which directly act on CACNA1A IRES and enhance α1ACT translation. Furthermore, adeno-associated viral delivery of miR-3191-5p ameliorates the Purkinje cell degeneration and ataxia caused by SCA6-associated α1ACT in our mouse model. These results suggest that miRNA-mediated selective translational block of second cistron could be potential therapeutic targets in diseases caused by IRES-driven pathogenic gene products.

[0184] Presently there are no definitive treatments for neurodegenerative diseases which, based on the diversity of mechanisms, may require precision medicine. Spinocerebellar ataxia type 6 (SCA6) is one of the most common forms of autosomal dominant SCA, representing 10-20% of patients with dominantly-inherited ataxia and approximately 5/100,000 (1-3). Patients with SCA6 develop slowly progressive cerebellar ataxia usually beginning at age 40-50 years associated with extensive selective Purkinje cell degeneration (4, 5). The mutational mechanism responsible for SCA6 is an expanded polyglutamine (polyQ)-encoding CAG repeat in the gene, CACNA1A, thought originally only to encode the α1A (Cav2.1, P/Q-type) voltage-gated Ca2+ channel subunit (2, 6). Attempts to implicate a disturbance of P/Q channel kinetics in SCA6 have been unsuccessful (7, 8). It has been discovered that the CACNA1A gene, is a bicistronic cellular gene, i.e., it encodes two structurally unrelated proteins, with distinct functions, that are separately encoded within the same transcript (9). CACNA1A encodes both α1A subunit and a newly recognized transcription factor, α1ACT, within an overlapping open reading frame (ORF) of the same mRNA. This is achieved by the presence of a novel internal ribosomal entry site (IRES) upstream of a second ORF encoding α1ACT. α1ACT bearing the polyQ expansion (α1ACT_{SCA6}) impairs its cellular and molecular functions, and α1ACT_{SCA6} causes increased cell death in cultured cell models and cerebellar atrophy and dysfunction in a transgenic mouse model (9). As a potential therapy, ablation or elimination of complete CACNA1A expression would be lethal (9, 10), although selective elimination of α1ACT protein could be a viable strategy. MicroRNAs (MiRNAs) have been increasingly recognized to play a role in the regulation of gene expression, in many cases by both translational repression and mRNA destabilization (11, 12), but to date have not been used to preferentially regulate the translation of disease genes driven by cellular IRES. Although prevailing evidence has pointed to the role of natural miRNAs in gene silencing and translational repression by binding to 3′ untranslated region (UTR) (or rarely 5′ UTR) of targeted mRNAs (11-16), predicted miRNA binding sites are found throughout the genome including both coding and non coding regions (17, 18).

[0185] The CentroidFold program (19) was used to predict that CACNA1A IRES has a stem-loop structure that plays an important role in IRES-driven translation of α1ACT (9). The miRNA_Targets program (17) demonstrates that miRNAs, miR-711 (Accession number_MIMAT0012734), -3191-5p (Accession number_MIMAT0022732), and -4786-3p (Accession number_MIMAT0019955) bind to sequences within the stem-loop structure of CACNA1A IRES (FIG. 5, A to C). To examine the effects of these miRNAs on CACNA1A IRES-driven translation, miRNAs with either a bicistronic IRES reporter vector or control vector were co-transfected into HEK293 cells (FIG. 6). Dual luciferase assays revealed that miR-711, -3191-5p, and -4786-3p significantly down-regulated the CACNA1A IRES-driven luciferase activities compared to a miRNA negative control (FIG. 1A). The effects of these miRNAs on CACNA1A-encoded C-terminal FLAG-tagged peptides (α1A-FLAG and α1ACT-FLAG) were tested with the pathological polyQ tract (Q33) in transfected HEK293 cells. Although miR-711 and -4′786-3p decreased both α1A-FLAG and α1ACT-FLAG expression, miR-3191-5p down-regulated α1ACT-FLAG expression, but spared α1A-FLAG expression (FIG. 1B). This was the case with α1A bearing both normal (Q11) and SCA6 (Q33) alleles (FIG. 7A). Quantitative real time-PCR (qRT-PCR) studies of total RNA showed that miR-711 and -4786-3p significantly decreased CACNA1A mRNA (α1A mRNA) levels relative to a miRNA negative control, but that miR-3191-5p did not affect α1A mRNA levels (FIG. 1C, FIG. 7B). To determine whether miR-3191-5p interacts with regions within the α1A mRNA other than the CACNA1A IRES, mutated CACNA1A IRES templates, resistant to the binding of miR-3191-5p (CACNA1A IRESmut: FIG. 1D, FIGS. 8, A and B) were prepared. CACNA1A IRESmut functioned normally both in the IRES dual luciferase assay and in α1A-FLAG and α1ACT-FLAG expressing HEK293 cells, but the inhibition by miR-3191-5p was prevented (FIGS. 1, E and F). Finally, miR-3191-5p did not affect the expression levels of endogenous α1A mRNA harboring the native 3′UTR sequence in HEK293 cells (FIG. 1G). These findings demonstrated that miR-3191-5p directly interacted with CACNA1A IRES and inhibited IRES-driven translation of α1ACT while sparing α1A expression.

[0186] miRNAs generally act on targeted mRNA in collaboration with the miRNA-induced silencing complex (miRISC)-guided Argonaute (Ago) proteins (20-24), although detailed mechanisms of the role of the four identified subtypes in translational repression remain to be determined. To examine the role of Ago proteins in the inhibitory effects of miR-3191-5p, miR-3191-5p were co-transfected with small interfering RNAs (siRNAs) targeting Ago1-4 and either a bicistronic IRES reporter vector or control vector into HEK293 cells. Dual luciferase assay revealed that the knockdown of Ago4, but not Ago1-3, blocked the silencing effects of miR-3191-5p on the CACNAJA IRES-driven luciferase activities (FIG. 1H). Western blot analysis showed that the silencing of Ago4, but not Ago1-3, also prevented the down-regulation of α1ACT-FLAG expression by miR-3191-5p (FIG. 1I). RNA immunoprecipitation (IP)-coupled qRT-PCR revealed the binding affinities of Ago4 to both miR-3191-5p and CACNAJA IRES (FIGS. 1, J and K, FIGS. 9, A and B). While previous studies have mainly focused on the interaction of Ago1 and Ago2 with miRNAs on the 3′ UTR of targeted mRNA, human Ago4 has been reported to be catalytically inactive (22-24).

[0187] Both eukaryotic initiation factors (eIFs), eIF4A and eIF4G, have been previously shown to be involved in the IRES-dependent translation in several types of virus IRESs (12), but have not been studied well in the context of mammalian IRES and regulation by miRNA. The effects of eIF4AI, eIF4AII, eIF4GI, and eIF4GII on CACNAJA IRES-driven translation were examined using our dual luciferase reporter assay. Over-expression of either eIF4AII or eIF4GII, but not eIF4AI and eIF4GI increased the CACNAJA IRES-driven luciferase activities. The effects of eIF4AII and eIF4GII were blocked by co-transfection with miR-3191-5p (FIG. 2A). Similarly, using the vector expressing α1A-FLAG and α1ACT-FLAG, it was found that over-expression of either eIF4AII or eIF4GII increased both α1A-FLAG and α1ACT-FLAG expression by western blot analysis, and that miR-3191-5p reversed the up-regulating effects of eIF4AII and eIF4GII on α1ACT-FLAG expression without affecting the eIF4AII and eIF4GII expression, respectively (FIG. 2B). Over-expression of either eIF4AII or eIF4GII did not affect the expression levels of α1A mRNA in qRT-PCR assays (FIG. 2C). The effects of miR-3191-5p depended on the interactions with CACNAJA IRES, because when the CACNAJA IRESmut vectors that were resistant to miR-3191-5p binding were used, miR-3191-5p did not block the up-regulating effects of eIF4AII and eIF4GII on CACNAJA IRES-driven luciferase activities (FIG. 2D) and α1ACT-FLAG expression (FIG. 2E). It was also found that eIF4AII associated with eIF4GII (FIG. 2F), which was consistent with the results of recent reports (25, 26). Dual luciferase assay revealed that eIF4GII, rather than eIF4AII, played a critical role in the initiation of the CACNA1A IRES-driven translation (FIG. 2G). Finally, the binding affinities of both eIF4AII and eIF4GII to CACNA1A IRES were tested using truncated transgenes of CACNA1A second cistron that lacked the sequence of 5′ up-stream from CACNA1A IRES (IRESstopmut-α1ACT: FIGS. 10, A and B), because both eIF4AII and eIF4GII affected not only CACNA1A-IRES driven translation of α1ACT but also cap-dependent α1A translation (FIG. 2B). RNA IP-coupled qRT-PCR revealed that both eIF4AII-specific and eIF4GII-specific antibodies precipitate mRNA transcribed from IRESstopmut-α1ACT vectors and that miR-3191-5p significantly decreased the binding affinities of both eIF4AII and eIF4GII to CACNA1A IRES (FIG. 2H). Based on these findings, it was concluded that miR-3191-5p, in collaboration with Ago4, inhibits the initiation of IRES-driven translation of α1ACT by the complex of eIF4AII and eIF4GII that directly acts on CACNA1A IRES to enhance IRES-driven translation.

[0188] It has already characterized the independent physiological and cellular pathological properties of wild type (WT) α1ACT and α1ACT_{SCA6} (9) in vivo although these transgenes lacked the CACNA1A IRES and produced a rather mild phenotype. Elimination of the portion of CACNA1A IRES sequence from the human mRNA encoding α1A-Q33 selectively eliminates the expression of α1ACT fragment and is protective in a cell culture model of α1ACT_{SCA6} toxicity without affecting α1A expression (9). It was reasoned that targeted expression of α1ACT, in which translation of α1ACT is under the control of CACNA1A IRES, would more accurately resemble SCA6 pathogenesis in a mouse model, while providing a suitable target for IRES-directed miRNA based therapy. Thus, an in vivo adeno-associated viral (AAV) delivery system was developed using the constructs of α1ACT transgene tagged with a C-terminal FLAG epitope, expressed under the control of CACNA1A IRES (AAV-α1ACT-Q11, or -Q33) (FIG. 11A). The control AAV vector expressing Aequorea coerulescens green fluorescent protein (GFP) (AAV-GFP) was also prepared. A viral load of 10⁹ vector genomes (vg) of each of these constructs was directly injected into the right lateral ventricle of neonatal WT mice of C57/BL6J at post-natal day 1. Four weeks after AAV vector injection, AAV-injected WT mice were sacrificed and a widespread transduction of the viral particles was found throughout the mouse brain and cerebellum. Western blot analysis revealed the strong expression of GFP, α1ACT-Q11-FLAG, or α1ACT-Q33-FLAG in the brain and cerebellum of WT mice injected with AAV-GFP (WT-GFP mice), AAV-α1ACT-Q11 (WT-α1ACT-Q11 mice), or AAV-α1ACT-Q33 (WT-α1ACT-Q33 mice) (FIG. 11B). The persistent expression of GFP, α1ACT-Q11-FLAG, or α1ACT-Q33-FLAG was confirmed for at least 12 weeks of our observation period (FIG. 11B). qRT-PCR studies of total RNA from the cerebellum of WT-α1ACT-Q11 mice and WT-α1ACT-Q33 mice showed that the expression levels of mRNA transcribed from the transgenes delivered by AAV were comparable (FIG. 11C). The presence of the AAV vector in the Purkinje cells of AAV-injected WT mice was visually confirmed by the co-localization of GFP or FLAG and staining for calbindin, a Purkinje cell marker (FIG. 3A). As compared to WT-GFP mice and WT-α1ACT-Q11 mice, WT-α1ACT-Q33 mice showed significant thinning of the molecular layer, decrease in the density of dendritic tree and number of Purkinje cells in the cerebellum (FIG. 3, B to E). Although WT-α1ACT-Q33 mice grew at roughly the same body weight as WT-GFP mice and WT-α1ACT-Q11 mice (FIG. 3F), WT-α1ACT-Q33 mice showed significant defects in motor functions assessed by rotarod (FIG. 3G), activities by open field assay (FIG. 3H), and gait stability by a video-assisted computerized treadmill (FIG. 12, A to F). The Digigait assay revealed that WT-α1ACT-Q33 mice exhibited shorter stride length (FIGS. 12, A, C, and E) and greater stride frequencies (FIGS. 12, B, D, and F) from 4 weeks old, indicating progressive instability during walking. These findings indicated that viral administration and expression of α1ACT_{SCA6} under the control of CACNA1A IRES resembled the pathological and clinical features of SCA6 (3, 4).

[0189] Next, to address the therapeutic effects of the reduction of IRES-driven translation of α1ACT_{SCA6} by miR-3191-5p on our SCA6 mouse model, we constructed an AAV vector that allowed for the simultaneous expression of GFP and either miR-3191-5p (AAV-miR-3191-5p) or a nonspecific miRNA, miR-mock (AAV-miR-mock). We then co-injected AAV-α1ACT-Q33 with either AAV-miR-3191-5p or AAV-miR-mock into the right lateral ventricle of neonatal WT mice of C57/BL6J at post-natal day 1. Western blot analysis revealed the persistent and widespread expression of α1ACT-Q33-FLAG or GFP in the brain and cerebellum of mice co-injected with AAV-α1ACT-Q33 and either AAV-miR-mock (WT-Q33-miR-mock mice) or AAV-miR-3191-5p (WT-Q33-miR-3191-5p mice) for at least 12 weeks and the significantly decreased α1ACT-Q33-FLAG protein levels in the brain and cerebellum of WT-Q33-miR-3191-5p mice as compared to WT-Q33-miR-mock mice (FIG. 13). WT-Q33-miR-3191-5p mice showed the same expression levels of mRNA transcribed from the transgenes delivered by AAV-α1ACT-Q33 in the cerebellum as compared to WT-Q33-miR-mock mice (FIG. 13). Immunohistochemical examination of mouse cerebellum showed normal thickness of the molecular layer, density of dendritic tree and number of Purkinje cells in the cerebellum of WT-Q33-miR-3191-5p mice (FIG. 4, A to D) compared with WT-Q33-miR-mock mice. Although the treatment with AAV-miR-3191-5p did not affect the clinical symptoms of body weight in WT-Q33-miR-3191-5p mice compared to WT-Q33-miR-mock mice (FIG. 4E), we found that the α1ACT_{SCA6}-associated disease phenotypes in WT-Q33-miR-3191-5p mice were prevented, assessed by rotarod (FIG. 4F), open field assay (FIG. 4G), and a video-assisted computerized treadmill for gait analysis (FIG. 14, A to F). We also monitored WT mice injected with AAV-miR-3191-5p at postnatal day 1 to examine the adverse off-target effects of the treatment with AAV-miR-3191-5p. We found no obvious adverse effects in mouse behavior or morphological anomalies in the brain, cerebellum, heart, lung, liver, and kidney of the WT mice injected with AAV-miR-3191-5p for at least 12 weeks (FIG. 15).

[0190] In summary, we discovered that miR-3191-5p directly acts on the CACNA1A IRES to regulate the translation of α1ACT, which requires the presence of Ago4. We have also demonstrated that miR-3191-5p bound to Ago4 preferentially inhibits the translational initiation of α1ACT by eukaryotic initiation factors, eIF4AII and eIF4GII, which enhance α1ACT translation. We further showed that the inhibition of the CACNA1A IRES-driven α1ACT_{SCA6} expression by the AAV vector-mediated delivery of miR-3191-5p has a therapeutic effect on the α1ACT_{SCA6}-induced SCA6 phenotypes in our model mouse.

[0191] Our results are the first to point to a specific role of a natural miRNA in repressing translation by the direct interaction with a site within cellular IRES (16, 27, 28). There are four members of the RNA-induced silencing complex-related Ago protein family in human, Ago1, Ago2, Ago3, and Ago4 (22). Very little is known about Ago4, although the absence of a catalytic domain suggests that it might have a distinct role in gene silencing compared with Ago2 (29-34). Our findings that Ago4 appears to selectively interact with a miRNA and the CACNA1A IRES to repress translation may suggest it has a specific role for mRNA-sparing translational repression via the miRISC, possibly even selectively for translational repression of IRESs. Finally, because therapy targeting IRES activity has been a mainstay of anti-viral therapy and not been employed for genetic disease (35-37), this work will prepare us for the development of therapies using a novel strategy by the selective suppression of IRES-driven pathogenic gene products based on delivery of disease-specific miRNAs in future.

[0192] This example demonstrates a novel miRNA-mediated therapeutic approach for spinocerebellar ataxia type 6 via the selective translational block of second cistron in CACNA1A gene.

### Example 2

[0193] This example provides a description of the materials and methods used in the experiments of Example 8.

[0194] Construction of DNA Plasmids

[0195] We used pcDNA3 vectors expressing CACNA1A-encoded FLAG-tagged peptides (α1A-FLAG and α1ACT-FLAG) and a bicistronic IRES reporter vector or control vector as described previously (9).

[0196] To obtain mutated transgenes that are resistant to the binding of miR-3191-5p (CACNA1A IRESmut vectors), we performed C>G and G>C substitutions within the predicted miR-3191-5p binding site. We also performed C>G and G>C substitutions within the complementary binding site of the sequence targeted by miR-3191-5p to maintain the structure of CACNA1A IRESmut same as that of the original (FIG. 1D, FIGS. 8, A and B). Briefly, we amplified the predicted binding site of miR-3191-5p using primers miR mut forward: 5′-ATGTCTCCGCCCCTGGGTCTccccAAcAAcTcTggccCCAGAGTGGCTTACAAGCG-3′ (SEQ ID NO: 182) and miR mut reverse: 5′-CGCTTGTAAGCCACTCTGGggccAgAgTTgTTggggAGACCCAGGGGCGGAGACAT-3′ (SEQ ID NO: 183), the complementary binding site of the sequence targeted by miR-3191-5p using primers anti-miR mut forward: 5′-ACTGAGCACAATAACTTggccAggTTgTTgg AGGCCCTCATGCTTCTC-3′ (SEQ ID NO: 184) and anti-miR mut reverse: 5′-GAGAAGCATGAGGGCCTccAAcAAccTggccAAGTTATTGTGCTCAGT-3′ (SEQ ID NO: 185). Then we annealed PCR products using primers anti-miR mut forward and miR mut reverse and inserted the annealed PCR products into the BIpI sites of pcDNA3 vectors expressing CACNA1A-encoded FLAG-tagged peptides and the EcoRI and NcoI sites of a bicistronic IRES reporter vector.

[0197] We also prepared the truncated transgenes of CACNA1A second cistron that lacked the sequence of 5′ up-stream from CACNA1A IRES (IRESstopmut-α1ACT: FIGS. 10, A and B). Briefly, the sequence of 4962 to 7757 nt of full-length CACNA1A (NM_001127222.1, NP_001120694.1), correspondent to the sequence of CACNA1A IRES and α1ACT open reading frame, was amplified using primers IRESstopmut-α1ACT forward: 5′ATCAGGATCCGCCCTCAACACCATCGTGC-3′ (SEQ ID NO: 186) and IRESstopmut-α1ACT reverse: 5′-GAATCTAGATTACTTGTCATCG-3′ (SEQ ID NO: 187) from pcDNA3 vectors expressing CACNAJA-encoded FLAG-tagged peptides. The PCR product was inserted into the BamHI and XbaI sites of pcDNA3 vectors. We also modified the sequence of 5013 to 5015 nt from “TAT” to “TAG” of stop codon.

[0198] pDEST-GFP-Ago4 is a kind gift from E. Chan (Addgene plasmid #21536) (38). pcDNA3-HA-eIF4GI and pcDNA3-HA-eIF4GII are kind gifts from N. Sonenberg (McGill University, Canada) (39). M. Bushell (Medical Research Council, UK) kindly provided us with the plasmid expressing human eIF4AI and eIF4AII (13). pcDNA3.1-HisXpress vector was a kind gift from T. Cooper (Baylor College of Medicine). From the plasmids expressing human eIF4AI and eIF4AII, we amplified human eIF4AI and eIF4AII cDNA using primers eIF4AI-PCR forward: 5′-ATCAGGATCCATGTCTGCGAGCCAGGAT-3′ (SEQ ID NO: 188); eIF4AI-PCR reverse: 5′-ATCAGGGCCCAGGTCAGCAACATTGAGG-3′ (SEQ ID NO: 189); and eIF4AII-PCR forward: 5′-ATCAGGATCCATGTCTGGTGGCTCCGCG-3′ (SEQ ID NO: 190); eIF4AII-PCR reverse: ATCAGGGCCCTTAAATAAGGTCAGCCAC-3′ (SEQ ID NO: 191), respectively. Then we inserted PCR products into BamHI and ApaI digested pcDNA3.1-HisXpress vectors to obtain pcDNA3.1-HisXpress-eIF4AI or -eIF4AII. We used the original either pcDNA3.1/HisC or pcDNA3-HA vectors lacking the insertions in the multiple cloning sites as control vectors.

[0199] Co-Transfection of DNA Plasmids with Either Synthetic miRNA or siRNA into Cultured Cells

[0200] HEK293 cells were cultured in DMEM supplemented with 10% FBS. All siRNAs and miRNAs were purchased from Life Technologies. ID numbers are shown as follows: Ago1 (s25500); Ago2 (s25931); Ago3 (s46947); Ago4 (s46949); eIF4AII (s4570); eIF4GII (s16519); a siRNA negative control (#12935-300); miR-711 (MC15715); miR-3191-5p (MC23769); miR-4786-3p (MC21295); and a miRNA negative control (#4464059). We plated HEK293 cells onto six-well dishes and co-transfected each dish with 1.0 μg of the vector expressing the following: a bicistronic IRES reporter, control reporter, and α1A-FLAG and α1ACT-FLAG; 0.5 μg of the vector expressing the following: eIF4AI, eIF4AII, eIF4GI, and eIF4GII; and either 20 nM synthetic miRNA or 20 nM siRNA molecules. We used Lipofectamine 2000 (Life Technologies) as a transfection reagent in all cases. Neither the siRNA negative control nor the miRNA negative control matched any human mRNA. The transfected cells were cultured for 48 hrs before being processed for RNA and protein analysis.

[0201] Luciferase Assay

[0202] HEK293 cells were plated onto six-well plates and co-transfected with a bicistronic IRES reporter vector or control vector. 48 hrs after co-transfection, luciferase activities were determined using the Dual-Luciferase Assay System (Promega) as manufacturer's instructions. The activities of Firefly and Renilla luciferase in lysates prepared from transfected cells using the Dual-Luciferase Assay System were measured by using a Wallac 1420 VICTOR 3 V luminometer with a 1 sec integration time (Perkin Elmer, Waltham, Mass.).

[0203] Protein Expression Analysis

[0204] We did western blot analysis as previously described (9, 40). We used the following primary antibodies: FLAG-specific antibody (1:5,000, A8592 and 1:5,000, F1804; Sigma-Aldrich); Ago1-specific antibody (1:2,000, 9388S; Cell Signaling Technology); Ago2-specific antibody (1:2,000, SAB4200085; Sigma-Aldrich); Ago3-specific antibody (1:2,000, 5054S; Cell Signaling Technology); Ago4-specific antibody (1:2,000, 6913S; Cell Signaling Technology); eIF4AII-specific antibody (1:2,000, ab31218; Abcam); eIF4GII-specific antibody (1:1,000, sc-100732; Santa Cruz Biotechnology); GFP-specific antibody (1:2,000, M048-3; MBL); GAPDH-specific antibody (1:5,000, AM4300; Life Technologies).

[0205] Quantitative Real-Time PCR

[0206] The total RNA was extracted from HEK293 cells and the brain and cerebellum of mice using the miRNeasy Mini Kit (Qiagen) and reverse transcribed using the Superscript VILO (Life Technologies) for mRNA and NCode VILO (Life Technologies) for miRNA. The complementary DNAs were then used for real time PCR using the iQ SYBR Green Supermix (Bio-Rad Laboratories). We did the amplification, detection, and data analysis using a Bio-Rad iCycler system (Bio-Rad Laboratories). The crossing threshold values for the mRNAs of the individual genes were normalized to beta-actin. The crossing threshold values for the miRNA of the individual genes were normalized to the U6 small nuclear RNA. Changes in the expression of mRNA and miRNA were expressed as a fold change relative to the control. We used the following primers in this study. The sequences of the hsa-CACNA1A primers were: forward, 5′-GTCTGGGGAAGAAGTGTCCG-3′ (SEQ ID NO: 192); reverse, 5′-GCTCCTCCCTTGGCAATCTT-3′ (SEQ ID NO: 193). These hsa-CACNA1A primers discriminated between the human CACNA1A mRNA and the mouse CACNA1A mRNA. The sequences of the luciferase reporter primers were: forward, 5′-TTTACATGGTAACGCGGCCT-3′ (SEQ ID NO: 194); reverse, 5′-GGTCTGGTATAATACACCGCGC-3′ (SEQ ID NO: 195). The sequences of the hsa-beta-actin primers were: forward, 5′-GCGGGAAATCGTGCGTGACATT-3′ (SEQ ID NO: 196); reverse, 5′-GATGGAGTTGAAGGTAGTTTCGTG-3′ (SEQ ID NO: 197). The sequences of the mmu-beta-actin primers were: forward, 5′-GCTACAGCTTCACCACCACA-3′ (SEQ ID NO: 198); reverse, 5′-TCTCCAGGGAGGAAGAGGAT-3′ (SEQ ID NO: 199). The sequences of the miR-3191-5p primers were: forward, 5′-GCTCTCTGGCCGTCTAC-3′ (SEQ ID NO: 200); reverse, 5′-GTCCAGTTTTTTTTTTTTTTTGGAAG-3′ (SEQ ID NO: 201). The sequences of the U6 small nuclear RNA primers were: forward, 5′-CTTCGGCAGCACATATACTAAA-3′ (SEQ ID NO: 202); reverse, 5′-AAAATATGGAACGCTTCACG-3′ (SEQ ID NO: 203). We designed the miR-3191-5p primers using a bioinformatics program (41).

[0207] Immunoprecipitation.

[0208] We plated HEK293 cells onto 100 mm dishes and co-transfected each dish with 3.0 μg of the vector expressing eIF4AII and eIF4GII. 48 hrs after transfection, we harvested HEK293 cells for immunoprecipitation using eIF4AII-specific antibody (5 μg per sample, ab31218; Abcam), eIF4GII-specific antibody (5 μg per sample, sc-100732; Santa Cruz Biotechnology), and Dynabeads™ Protein G Immunoprecipitation Kit (Life Technologies) according to the manufacturer's suggested protocols. An rabbit immunoglobulin G (5 μg per sample, PP64B; Millipore) and mouse immunoglobulin G (5 μg per sample, CS200621; Millipore) were used as controls.

[0209] Immunoprecipitation-Coupled qRT-PCR.

[0210] We plated HEK293 cells onto 100 mm dishes and co-transfected each dish with 2.0 μg of the vector expressing the following: full-length CACNA1A-Q33-encoded FLAG-tagged peptides, GFP-miR-3191-5p (SC401396; OriGene), GFP-Ago4, bicistronic IRES reporter, control reporter, eIF4AII, eIF4GII, or the truncated transgenes of CACNA1A second cistron lacking the sequence of 5′ up-stream from CACNA1A IRES (IRESstopmut-α1ACT). We used the original either pcDNA3.1/HisC or pcDNA3-HA vectors lacking the insertions in the multiple cloning sites as control vectors. 48 hrs after transfection, we harvested HEK293 cells for co-immunoprecipitation using Ago4-specific antibody (5 μg per sample, 6913S; Cell Signaling Technology), eIF4AII-specific antibody (5 μg per sample, ab31218; Abcam), eIF4GII-specific antibody (5 μg per sample, sc-100732; Santa Cruz Biotechnology), and Magna RIP™ RNA-Binding Protein Immunoprecipitation Kit (Millipore) according to the manufacturer's suggested protocols. An rabbit immunoglobulin G (5 μg per sample, PP64B; Millipore) and mouse immunoglobulin G (5 μg per sample, CS200621; Millipore), supplied by the manufacturer, were used as controls. Immunoprecipitated RNA was converted to cDNA using Superscript VILO (Life Technologies) for mRNA and NCode VILO (Life Technologies) for miRNA and analyzed by qRT-PCR for the differential expression of α1A-Q33 mRNA and IRESstopmut-α1ACT mRNA using the following primers: forward, 5′-GTCTGGGGAAGAAGTGTCCG-3′ (SEQ ID NO: 192); reverse, 5′-GCTCCTCCCTTGGCAATCTT-3′ (SEQ ID NO: 193), miR-3191-5p: forward, 5′-GCTCTCTGGCCGTCTAC-3′ (SEQ ID NO: 200); reverse, 5′-GTCCAGTTTTTTTTTTTTTTTGGAAG-3′ (SEQ ID NO: 201), a bicistronic IRES reporter vector: forward, 5′-TGCTGACTGTTTTCCAGTGC-3′ (SEQ ID NO: 204); reverse, 5′-AAGGAGCCGATGATGATGAG-3′ (SEQ ID NO: 205), and control reporter vector: forward, 5′-TTTACATGGTAACGCGGCCT-3′ (SEQ ID NO: 194); reverse, 5′-GGTCTGGTATAATACACCGCGC-3′ (SEQ ID NO: 195).

[0211] Development of the Adeno-Associated Virus (AAV) Vectors Expressing FLAG Tagged α1ACT Under the Control of CACNA1A IRES or Simultaneous Expression of miRNA and GFP.

[0212] The AAV vector plasmids contained an expression cassette consisting of a human cytomegalovirus immediate-early promoter, followed by a target DNA or miR, and a simian virus 40 polyadenylation signal sequence between the inverted terminal repeats of the AAV3 genome. The AAV9 vp cDNA was synthesized as previously described with the substitution of thymidine for adenine 1337, which introduced an amino acid change from tyrosine to phenylalanine at position 446 (42). Recombinant AAV vectors were produced by transient transfection of HEK293 cells using the vector plasmid, an AAV3 rep and AAV9 vp expression plasmid, and the adenoviral helper plasmid pHelper (Agilent Technologies, Santa Clara, Calif.). The recombinant viruses were purified by isolation from two sequential continuous CsCl gradients, and the viral titers were determined by qRT-PCR. The viral vectors used for expression of α1ACT with normal repeat size (AAV-α1ACT-Q11) and mutant repeat size (AAV-α1ACT-Q33) contained the truncated transgenes of CACNA1A second cistron that lacked the sequence of 5′ up-stream from CACNA1A IRES (IRESstopmut-α1ACT) (FIG. 11A). AAV-GFP contained the Aequorea coerulescens GFP. The sequences of miR-3191-5p and miR-mock are as follows. miR-3191-5p: 5′GGGGTCACCTCTCTGGCCGTCTACCTTCCACACTGACAAGGGCCGTGGGGACGT AGCTGGCCAGACAGGTGACCCC-3′ (SEQ ID NO: 181); miR-mock: 5′-GTATTGC GTCTGTACACTCACCGTTTTGGCCACTGACTGACGGTGAGTGCAG ACGCAATA-3′ (SEQ ID NO: 206).

[0213] Injection of AAV into the Ventricle of Neonatal Wild-Type (WT) Mice.

[0214] C57/BL6J mice were purchased from Jackson Laboratory and maintained in our breeding colony. At post-natal day 1, neonatal mice were individually anesthetized on ice, and a total of 10⁹ vector genomes in 3-5 μl of AAV solution was injected into the right lateral ventricle with a Hamilton syringe 10 ul, 32G (Hamilton Company). The viral solution contained 0.04% trypan blue (Sigma-Aldrich) to help determine if the ventricles were indeed injected. Only those neonatal WT mice in which the lateral ventricles were filled with viral solution were analyzed. 6 male and 6 female mice were enrolled into each group: two groups of WT-GFP mice; WT-α1ACT-Q11 mice; WT-α1ACT-Q33 mice; WT-Q33-mock mice; and WT-Q33-miR-3191-5p mice. All animal experiments were approved and carried out in accordance with the regulations and guidelines for the care and use of experimental animals at the Institutional Animal Care and Use Committee of the University of Chicago.

[0215] The Neurological and Behavioral Assessment of the WT Mice Injected with AAV.

[0216] We examined the neurological and behavioral assessments of all mice at 4, 8, and 12 weeks of age.

[0217] Rotarod-Task.

[0218] We analyzed rotarod task of mice using an Economex Rotarod (Colombus Instruments, Colombus, Ohio) with accelerating mode (4-40 rpm, acceleration with 0.1 rpm per 0.8 sec). We performed three consecutive trials and recorded the longest duration on the rod for each mouse.

[0219] Open Field Assay.

[0220] We examined open field assay using Mouse Open Field Arena and 48 Cannel IR Controller for Open Field Activity (ENV-510 and ENV-520; Med Associates, Inc., St Albans City, Vt.). Briefly, mice were placed in the center of open field area and their movements were monitored through the side-mounted photobeams for 30 min. We analyzed multiple parameters using Activity Monitor software (Med Associates, Inc., St Albans City, Vt.) and adopted total distance traveled to assess the activity of each mouse.

[0221] Digigait Analysis.

[0222] We also examined a video-assisted computerized treadmill for mouse gait analysis using a Digigait with Digigait software (Mouse Specifics, Framingham, Mass.). All mice were tested at the speed of 25 cm/sec. Stance length was normalized to mouse body length.

[0223] Immunohistochemistry, Immunofluorescence, and Histopathology

[0224] Immunohistochemistry was performed as previously reported except as modified below (43). Briefly, paraffin-embedded sections of perfused brains were de-waxed and rehydrated, then steamed for 20 min in antigen retrieval solution (Reveal; Biocare Medical, Walnut Creek, Calif.). Sections were blocked and exposed to primary antibody for 12 hrs at 4° C. After washing, fluorescent secondary antibody in PBS-T (phosphate buffered saline and 0.05% Tween-20) was added for 1 hr at room temperature. Confocal fluorescence images were captured with a Leica TCS SP2 laser scanning confocal microscope (Leica Microsystems, Inc., Buffalo Grove, Ill.). We used NIH Image J software to quantify the percentage of specific expression of antibody in each sample. The molecular layer thickness and density of Purkinje dendritic trees were calculated as previously described (9, 44). Purkinje cells selected for the measurements spanned the molecular layer were well-stained and were not obscured by adjacent cells. The dendritic trees of the captured Purkinje cell image and the area enclosed were outlined and measured using NIH Image J software. 50-100 Purkinje cells were analyzed in each sample to calculate the mean of the density of Purkinje dendritic trees. To assess the number of Purkinje cells in cerebellum, we calculated the number of Purkinje cells in the entire area and expressed the results as the number per 250 μm. We used the following primary antibodies: FLAG-specific antibody (1:200, F1804; Sigma-Aldrich); GFP-specific antibody (1:200, M048-3; MBL); calbindin-specific antibody (1:200, CB38a; Swant). Goat AlexaFluor 488-conjugated anti-rabbit and goat AlexaFluor 594-conjugated anti-mouse IgG antibodies (Lifetechnologies) were used for secondary fluorescence detection. For the tissue sections stained with Hematoxilyn and eosin staining, digital image files were created with a 3D Histech Pannoramic Scan whole slide scanner (Perkin Elmer, Waltham, Mass.) with a Stingray F146C color camera (Allied Vision Technologies, Stadtroda, Germany). Individual images were created with the 3D Histech Pannoramic Viewer software (Perkin Elmer, Waltham, Mass.).

[0225] Statistical Analysis

[0226] All data represent 3 biological repeats unless stated otherwise. Values represent mean±standard error of the mean (S.E.M.). Differences between experimental groups were compared by Student's t-test (two tailed), or two-way ANOVA with Bonferroni post-test when multiple comparisons were made. Statistical significance in figures: * P<0.05, ** P<0.01, *** P<0.001, n.s.: not significant.

### Example 3

[0227] This example demonstrates selectively turning off disease genes without disrupting other processes, a growing goal of genetic research. In this example, we work with a gene that expresses two proteins, a calcium channel, necessary for life, and a regulatory protein, α1ACT, which, when mutated, causes a form of ataxia called SCA6. We figured out how to block expression of the disease protein without affecting the calcium channel using a small sequence of RNA called miRNA. We then used a viral vector to deliver this miRNA to mice engineered to develop a severe form of SCA6 and successfully prevented the disease.

[0228] Spinocerebellar ataxia type 6 (SCA6) is a dominantly inherited neurodegenerative disease characterized by slowly progressive ataxia and Purkinje cell degeneration. SCA6 is caused by a polyglutamine repeat expansion within a second CACNA1A gene product, α1ACT. α1ACT expression is under the control of an internal ribosomal entry site (IRES) present within the CACNA1A coding region. Whereas SCA6 allele knock-in mice show indistinguishable phenotypes from wild-type littermates, expression of SCA6-associated α1ACT (α1ACTSCA6) driven by a Purkinje cell-specific promoter in mice produces slowly progressive ataxia and cerebellar atrophy. We developed an early-onset SCA6 mouse model using an adeno-associated virus (AAV)-based gene delivery system to ectopically express CACNA1A IRES-driven α1ACTSCA6 to test the potential of CACNA1A IRES-targeting therapies. Mice expressing AAV9-mediated CACNA1A IRES-driven α1ACTSCA6 exhibited early-onset ataxia, motor deficits, and Purkinje cell degeneration. We identified miR-3191-5p as a microRNA (miRNA) that targeted CACNA1A IRES and preferentially inhibited the CACNA1A IRES-driven translation of α1ACT in an Argonaute 4 (Ago4)-dependent manner. We found that eukaryotic initiation factors (eIFs), eIF4AII and eIF4GII, interacted with the CACNA1A IRES to enhance α1ACT translation. Ago4-bound miR-3191-5p blocked the interaction of eIF4AII and eIF4GII with the CACNA1A IRES, attenuating IRES-driven α1ACT translation. Furthermore, AAV9-mediated delivery of miR-3191-5p protected mice from the ataxia, motor deficits, and Purkinje cell degeneration caused by CACNA1A IRES-driven α1ACTSCA6. We have established proof of principle that viral delivery of an miRNA can rescue a disease phenotype through modulation of cellular IRES activity in a mouse model.

[0229] Introduction

[0230] Spinocerebellar ataxias (SCAs) are a genetically heterogeneous group of dominantly inherited neurodegenerative diseases characterized by progressive ataxia and Purkinje cell degeneration (1-3). To date, more than 30 SCAs have been characterized, each being associated with distinct genes and mutations and therefore requiring individual therapeutic approaches (2, 3). The lack of efficacious therapeutics and the large number of genetic events that result in SCAs have highlighted the need for effective preclinical models to identify and test “druggable” targets.

[0231] SCA type 6 (SCA6) is one of the most common forms of autosomal dominant SCAs, representing 10 to 20% of patients with dominantly inherited ataxia. It has an incidence of about 5/100,000 persons (2-8). Patients with SCA6 develop slowly progressive cerebellar ataxia with extensive selective Purkinje cell degeneration, usually beginning at 40 to 50 years of age (2-8). SCA6 is caused by an expanded CAG repeat in the CACNA1A gene, which results in an expanded polyglutamine (polyQ) tract. Previous studies unexpectedly found that the expanded polyQ tract does not affect the function or kinetics of the α1A (Cav2.1, P/Q-type) voltage-gated Ca2+ channel subunit, a gene product of the full-length CACNA1A gene (9, 10). Additionally, SCA6 allele knock-in mice were indistinguishable from wild-type littermates, even in old age (9, 10).

[0232] We recently discovered that the CACNA1A gene is bicistronic, that is, it encodes both the full-length α1A subunit and a newly recognized transcription factor, α1ACT, consisting of 547 amino acids of the C terminus encoded within a separate open reading frame (ORF) of the same mRNA. The second cistron is translated from a newly identified internal ribosomal entry site (IRES) upstream of the second ORF. We have also characterized the cellular physiological and pathological properties of both wild-type α1ACT and an expanded polyQ tract containing α1ACT in vivo, showing that the expanded polyQ tract in α1ACT results in the SCA6 phenotype. Additionally, we showed that elimination of the portion of the IRES sequence from the human mRNA encoding SCA6-associated α1A selectively eliminated the expression of the SCA6-associated α1ACT (α1ACTSCA6) fragment and was protective in a cell culture model of α1ACTSCA6 toxicity (11). Because the complete silencing of CACNA1A gene expression would be lethal (11, 12), a more suitable therapeutic approach for SCA6 would be to selectively eliminate expression of α1ACT while sparing α1A expression. We reasoned that modulating the expression of microRNAs (miRNAs) targeting the CACNA1A IRES could offer a new therapeutic approach for treating SCA6 through regulation of IRES-dependent α1ACTSCA6 translation. On the basis of this hypothesis, we developed a mouse model in which α1ACTSCA6 was expressed in a CACNA1A IRES-dependent manner.

[0233] Results

[0234] Somatic Gene Transfer of CACNA1A IRES-Driven α1ACTSCA6 Causes Purkinje Cell Degeneration in Mice

[0235] We established an in vivo adeno-associated virus type 9 (AAV9) delivery system using the constructs of α1ACT transgenes tagged with a C-terminal FLAG epitope, expressed under the control of CACNA1A IRES (IRES-α1ACT-Q11 and IRES-α1ACT-Q33, FIG. 24A; AAV9-α1ACT-Q11 and AAV9-α1ACT-Q33, FIG. 24B). We also prepared a control AAV9 vector expressing green fluorescent protein (GFP) (AAV9-GFP). A viral load of 1010 vector genomes (vg) of each of these constructs was directly injected into the right lateral ventricle of neonatal wild-type C57/BL6J mice at postnatal day 1. In vivo delivery of AAV9 by intraventricular injection resulted in more than 75% of Purkinje cells being transduced with the AAV9 vector (FIGS. 24, C and D). Four weeks after AAV9 vector injection, we sacrificed the mice and found widespread expression of α1ACT-Q11-FLAG or α1ACT-Q33-FLAG that was predominantly observed in the cerebral cortex and cerebellum of wild-type mice injected with AAV9-α1ACT-Q11 (AAV9-α1ACT-Q11 mice) or AAV9-α1ACT-Q33 (AAV9-α1ACT-Q33 mice) (16, A and B). Quantitative real-time polymerase chain reaction (qRT-PCR) of total RNA from the cerebellum of AAV9-injected mice revealed that α1ACT mRNA in the cerebellum of AAV9-α1ACT-Q11 and AAV9-α1ACT-Q33 mice showed a greater than 2.5-fold up-regulation compared to mouse endogenous CACNA1A mRNA in the cerebellum of wild-type mice injected with AAV9-GFP (AAV9-GFP mice). Expression of IRES-α1ACT-Q11 mRNA in AAV9-α1ACT-Q11 mice was comparable to that of IRES-α1ACT-Q33 mRNA in AAV9-α1ACT-Q33 mice (FIG. 16C). CACNA1A IRES-driven α1ACT protein expression in the cerebellum was also comparable between AAV9-α1ACT-Q11 and AAV9-α1ACT-Q33 mice (FIG. 16D).

[0236] We found that, compared with AAV9-α1ACT-Q11 mice, AAV9-α1ACT-Q33 mice showed a significant decrease in the molecular layer thickness (P<0.01) and the density of the Purkinje cell dendritic tree (P<0.01) (FIG. 16, E to G). We also found that AAV9-α1ACT-Q33 caused a 50% loss of Purkinje cells in the cerebellum (FIG. 16H) but no obvious pathological changes in the cerebral cortex and hippocampus (FIGS. 25, A and B). These pathological features in the cerebellum of AAV9-α1ACT-Q33 mice resembled those of Purkinje cell degeneration in patients with SCA6 (13-15).

[0237] CACNA1A IRES-Driven α1ACTSCA6 Causes an Early-Onset Ataxia and Motor Deficits in Mice

[0238] To assess the behavioral phenotype of AAV9-α1ACT-Q33 mice, we used a rotarod performance test, an open-field assay, and a gait stability assessment using a video-assisted computerized treadmill (DigiGait) for gait analysis. AAV9-α1ACT-Q33 mice grew at roughly the same rate and had a comparable body weight to AAV9-α1ACT-Q11 and AAV9-GFP mice (FIG. 17A). However, AAV9-α1ACT-Q33 mice showed defects in motor functions as assessed by the rotarod test (FIG. 17B), activity in the open-field assay (FIG. 17C), and gait stability by the gait analysis assay (FIGS. 17, D and E). AAV9-α1ACT-Q33 caused impaired performance on the accelerating rotarod test in mice beginning at 4 weeks of age (P<0.01) (FIG. 17B). Ambulatory distance in the open-field test was significantly shorter in AAV9-α1ACT-Q33 mice than in AAV9-α1ACT-Q11 and AAV9-GFP mice (P<0.01) (FIG. 17C). DigiGait analyses revealed that AAV9-α1ACT-Q33 mice exhibited shorter stride length (P<0.05) (FIG. 17D) and greater stride frequencies (P<0.05) (FIG. 17E) in all four limbs from 4 weeks of age, indicating early-onset instability during walking. AAV9-α1ACT-Q33 mice often showed weaving from side to side on a treadmill, whereas AAV9-α1ACT-Q11 and AAV9-GFP mice typically walked straight (movies S1 to S3). Furthermore, the deficit in behavioral phenotypes of AAV9-α1ACT-Q33 mice and continuous CACNA1A IRES-driven α1ACT expression in the cerebellum were observed over a long-term follow-up of 30 weeks (FIG. 26, A to G). These findings indicate that AAV9-mediated somatic gene transfer of α1ACTSCA6 under the control of CACNA1A IRES caused severe ataxia in mice at much earlier ages and more reproducibly than the Purkinje cell-specific promoter-driven transgenic SCA6 mouse model we previously developed (11).

[0239] miR-3191-5p Inhibits the CACNA1A IRES-Driven Translation of α1ACT while Sparing α1A and CACNA1A mRNA Expression

[0240] To develop a CACNA1A IRES-directed therapeutic approach for SCA6, we used an miRNA-mediated approach. miRNAs have been increasingly recognized to play a role in the regulation of gene expression, in many cases by both translational repression and mRNA destabilization (16, 17). To date, miRNAs have not been used to preferentially regulate the translation of disease genes driven by a cellular IRES. Although prevailing evidence has pointed to the role of natural miRNAs in gene silencing and translational repression through binding to 3′ untranslated regions (UTRs), or rarely 5′UTR, of targeted mRNAs (16-21), predicted miRNA binding sites are found throughout the genome including in both coding and noncoding regions (22,23).

[0241] We used the miRNA_Targets program (22) to predict that miRNAs-miR-711 (accession number, MIMAT0012734), miR-3191-5p (accession number, MIMAT0022732), and miR-4786-3p (accession number, MIMAT0019955)—bind to sequences within the stem-loop structure of CACNA1A IRES (FIG. 27, A to D) (24). To examine the effects of these miRNAs on CACNA1A IRES-driven translation, we cotransfected these miRNAs with either a bicistronic reporter vector bearing CACNA1A IRES or a control vector into human embryonic kidney (HEK) 293 cells (FIG. 18A). Dual-luciferase assays revealed that miR-711, miR-3191-5p, and miR-4786-3p down-regulated CACNA1A IRES-driven luciferase activities compared to a negative control miRNA (FIG. 18B). We tested the effects of these miRNAs on CACNA1A-encoded C-terminal FLAG-tagged peptides (α1A-FLAG and α1ACT-FLAG) with the normal (Q11) or pathological (Q33) polyQ tract in transfected HEK293 cells. Although miR-711 and miR-4786-3p decreased full-length α1A-FLAG and α1ACT-FLAG expression, miR-3191-5p down-regulated α1ACT-FLAG expression but spared α1A-FLAG expression (FIGS. 18, C and D). This was the case with α1A-FLAG and α1ACT-FLAG in mice with the normal (Q11) or pathological (Q33) polyQ tract. qRT-PCR studies of total RNA showed that miR-711 and miR-4786-3p decreased CACNA1A mRNA expression relative to a negative control miRNA, but miR-3191-5p did not affect either CACNA1A-Q11 or CACNA1A-Q33 mRNA expression (FIGS. 18, E and F). We also found that miR-3191-5p did not affect endogenous CACNA1A mRNA expression in HEK293 cells (FIG. 18G).

[0242] To determine whether miR-3191-5p interacts with regions within the CACNA1A mRNA other than the CACNA1A IRES, we prepared mutated CACNA1A IRES templates, resistant to the binding of miR-3191-5p (CACNA1A IRESmut) (FIG. 28, A to C). CACNA1A IRESmut functioned normally both in the CACNA1A IRESmut dual-luciferase assays and in the α1A-FLAG- and α1ACT-FLAG-expressing HEK293 cells, but inhibition of expression by miR-3191-5p was prevented (FIGS. 28, D and E). These results suggest that miR-3191-5p interacts with CACNA1A IRES only through its predicted binding site and inhibits the CACNA1A IRES-driven translation of α1ACT while sparing α1A expression and CACNA1A mRNA expression.

[0243] Ago4 is Required for miR-3191-5p-Mediated Inhibition of α1ACT Translation

[0244] miRNAs generally act on targeted mRNAs in collaboration with the miRNA-induced silencing complex (miRISC)-guided Argonaute (Ago) proteins (25-29). To examine the role of Ago proteins on the inhibitory effects of miR-3191-5p, we cotransfected HEK293 cells with miR-3191-5p and small interfering RNAs (siRNAs) targeting Ago1 to Ago4 carried on either a bicistronic reporter vector bearing the CACNA1A IRES or a control vector. Dual-luciferase assays revealed that knockdown of Ago4, but not Ago1 to Ago3, reversed the silencing effects of miR-3191-5p on the CACNA1A IRES-driven luciferase activities (FIG. 19A). Western blot analyses showed that silencing of Ago4, but not Ago1 to Ago3, also prevented the down-regulation of α1ACT-FLAG expression by miR-3191-5p, suggesting that Ago4 is required for miR-3191-5p-mediated inhibition of α1ACT translation (FIG. 19B).

[0245] To determine whether Ago4 directly associates with both miR-3191-5p and CACNA1A mRNA or whether Ago4 indirectly mediates the silencing effects of miR-3191-5p, we performed RNA immunoprecipitation-coupled qRT-PCR studies using antibodies specific to Ago1 to Ago4. We found that Ago2- and Ago4-specific antibodies preferentially precipitated miR-3191-5p to a greater extent than did control IgG. Only Ago4-specific antibodies specifically precipitated CACNA1A mRNA, indicating that Ago4 selectively bound to both miR-3191-5p and CACNA1A mRNA C and D). Ago1- and Ago3-specific antibodies had no effect. We also confirmed that knockdown of Ago4 did not affect miR-3191-5p expression in HEK293 cells (FIG. 19E). These results suggest that miR-3191-5p bound to Ago4 directly interacts with the CACNA1A IRES and selectively inhibits the CACNA1A IRES-driven α1ACT translation.

[0246] miR-3191-5p Inhibits the Translational Initiation of CACNA1A IRES-Driven α1ACT by eIF4AII and eIF4GII

[0247] Because both eukaryotic initiation factors (eIFs) eIF4A and eIF4G have been previously shown to be involved in IRES-dependent translation in several types of viral IRESs (17), we examined the effects of these on CACNA1A IRES-driven α1ACT translation. We found that overexpression of either eIF4AII or eIF4GII, but not eIF4AI or eIF4GI, increased the CACNA1A IRES-driven luciferase activities and that the effects of eIF4AII and eIF4GII were blocked by cotransfection with miR-3191-5p (FIG. 20, A to D). Western blot analyses showed that overexpression of either eIF4AII or eIF4GII increased both α1A-FLAG and α1ACT-FLAG expression and that miR-3191-5p reversed the up-regulating effects of eIF4AII and eIF4GII on α1ACT-FLAG expression without affecting eIF4AII and eIF4GII expression (FIGS. 20, E and F). We also found that overexpression of either eIF4AII or eIF4GII in the presence or absence of miR-3191-5p did not affect CACNA1A mRNA expression (FIGS. 20, G and H). When we used CACNA1A IRESmut templates, the miR-3191-5p-mediated inhibition of the up-regulating effects of eIF4AII and eIF4GII on both CACNA1A IRESmut dual-luciferase activities and α1ACT-FLAG expression were prevented, indicating that the effects of miR-3191-5p depended on its interactions with CACNA1A IRES (FIG. 29, A to D).

[0248] Because both eIF4AII and eIF4GII affected not only CACNA1A IRES-driven translation of α1ACT but also cap-dependent translation of full-length α1A (FIGS. 20, E and F), we used IRES-α1ACT vectors (FIG. 24A) to test the binding affinities of eIF4AII and eIF4GII to CACNA1A IRES. RNA immunoprecipitation-coupled qRT-PCR studies revealed that both eIF4AII- and eIF4GII-specific antibodies precipitated IRES-α1ACT mRNAs to a greater extent than did control IgG, and that binding affinities between IRES-α1ACT mRNAs and both eIF4AII and eIF4GII were decreased by treatment with miR-3191-5p (FIGS. 20, I and J). Coimmunoprecipitation studies revealed that eIF4AII associated with eIF4GII (FIG. 20K) We also found that knockdown of eIF4GII had a greater effect on the down-regulation of CACNA1A IRES-driven α1ACT translation than did knockdown of eIF4AII (FIG. 20L). On the basis of these findings, we concluded that the complex of eIF4AII and eIF4GII directly acts on the CACNA1A IRES to enhance IRES-driven α1ACT translation (FIG. S6E). miR-3191-5p bound to Ago4 selectively inhibits the translational initiation of CACNA1A IRES-driven α1ACT by eIF4AII and eIF4GII (FIG. 29F).

[0249] miR-3191-5p Prevents Purkinje Cell Degeneration in Mice Caused by CACNA1A IRES-Driven α1ACTSCA6

[0250] To examine the therapeutic effects of miR-3191-5p-mediated reduction of CACNA1A IRES-driven α1ACTSCA6 translation on the disease phenotype of SCA6 mice, we constructed an AAV9 vector that allowed for the simultaneous expression of GFP and either miR-3191-5p (AAV9-miR-3191-5p) or a nonspecific mock miRNA (AAV9-miR-mock) (FIG. 30A). We then co-injected AAV9-α1ACT-Q33 with either AAV9-miR-3191-5p (AAV9-Q33-miR-3191-5p) or AAV9-miR-mock (AAV9-Q33-miR-mock) into the right lateral ventricle of neonatal wild-type C57/BL6J mice at postnatal day 1. Four weeks after AAV9 vector injection, we sacrificed AAV9-injected mice and found widespread transduction of miR-mock and miR-3191-5p throughout the brain and cerebellum (FIGS. 21, A and C). We also found a high efficiency (>80%) of cotransduction of AAV9-α1ACT-Q33 and either AAV9-miR-mock or AAV9-miR-3191-5p in the cerebellum of AAV9-injected mice (FIGS. 30, B and C). There was a decrease in CACNA1A IRES-driven α1ACT-Q33-FLAG protein expression in the brain and cerebellum of AAV9-Q33-miR-3191-5p mice as compared to AAV9-Q33-miR-mock mice (FIGS. 21, B and D). Whereas IRES-α1ACT-Q33 mRNA expression in the cerebellum of AAV9-Q33-miR-3191-5p mice was comparable to that for AAV9-Q33-miR-mock mice (FIG. 21E), Western blot analyses supported the silencing effect of miR-3191-5p on CACNA1A IRES-driven α1ACT-Q33-FLAG protein expression in the cerebellum of AAV9-Q33-miR-3191-5p mice compared to AAV9-Q33-miR-mock mice (FIG. 21F). Using RNA immunoprecipitation-coupled qRT-PCR studies, we also confirmed that Ago4 bound to both miR-3191-5p and IRES-α1ACT-Q33 mRNA in the cerebellum of AAV9-Q33-miR-3191-5p mice (FIGS. 21, G and H).

[0251] Immunohistochemical examination of AAV9-Q33-miR-3191-5p mouse cerebellum showed that the treatment with AAV9-miR-3191-5p protected Purkinje cells from degenerative changes (FIG. 22, A to D). As compared to AAV9-Q33-miR-mock mice, AAV9-miR-3191-5p mice showed protection from thinning of the molecular layer of the cerebellum (P<0.01) (FIG. 22B), decreased density of the dendritic tree (P<0.01) (FIG. 22C), and decreased number of Purkinje cells (P<0.01) (FIG. 22D) caused by AAV9-delivered IRES-driven α1ACT-Q33. These results indicate that AAV9-delivered miR-3191-5p inhibited Purkinje cell degeneration caused by CACNA1A IRES-driven α1ACTSCA6 in mice.

[0252] miR-3191-5p Prevents the Ataxia and Motor Deficits Caused by CACNA1A IRES-Driven α1ACTSCA6 in Mice

[0253] We further examined the therapeutic effect of AAV9-miR-3191-5p on mouse behavioral phenotypes caused by CACNA1A IRES-driven α1ACTSCA6. Although the treatment with AAV9-miR-3191-5p did not affect the body weight of AAV9-Q33-miR-3191-5p mice compared to AAV9-Q33-miR-mock mice (FIG. 23A), we found that the CACNA1A RES-driven α1ACTSCA6-associated disease phenotypes in AAV9-Q33-miR-3191-5p mice were prevented, as assessed by the rotarod test (FIG. 23B), open-field assay (FIG. 23C), and DigiGait for gait analysis (FIGS. 23, D and E). AAV9-Q33-miR-3191-5p mice performed significantly better on the accelerating rotarod test (P<0.01) (FIG. 23B) and ambulated a greater distance in the open-field test than did AAV9-Q33-miR-mock mice (P<0.01) (FIG. 23C) at 4 weeks of age. As compared to AAV9-Q33-miR-mock mice, AAV9-Q33-miR-3191-5p mice exhibited improvement of gait instability in all four limbs caused by AAV9-delivered IRES-driven α1ACT-Q33 (P<0.05) (FIGS. 23, D and E). We also found that treatment with AAV9-miR-3191-5p prevented the weaving steps of AAV9-Q33-miR-3191-5p mice (movies S4 and S5). Furthermore, the therapeutic effect of AAV9-miR-3191-5p on mouse behavioral phenotypes and CACNA1A IRES-driven α1ACT-Q33 expression in the cerebellum of AAV9-Q33-miR-3191-5p mice persisted during long-term follow-up of 30 weeks (FIG. 31, A to G).

[0254] Although both mature and stem-loop sequences of hsa-miR-3191-5p used in our study are identified in the human genome (miRBase: www.mirbase.org/), those of mmu-miR-3191-5p have not yet been identified in the mouse genome. To identify other potential candidates of hsa-miR-3191-5p-targeting mRNAs in mouse, we first used TargetScanHuman 7.0 (www.targetscan.org/vert_70) to find the top 100 ranked hsa-miR-3191-5p-targeting human mRNAs. We selected 13 genes with high reliability (cumulative weighted context++ score <−1 and total context++ score <−1) (FIG. 32A). Among these, seven genes (PRX, ZNF781, C22orf46, ZNF23, ZNF286A, ERBB4, and PTBP1) have hsa-miR-3191-5p binding sites within the 3′UTR of their conserved mouse orthologs. We examined the mRNA levels of these seven genes in the cerebellum of wild-type mice injected with AAV9-miR-3191-5p compared to those injected with AAV9-miR-mock. We found that AAV9-miR-3191-5p down-regulated the mRNA expression of mouse orthologs of ZNF781, C22orf46, ZNF23, and ERBB4 by about 50%, whereas those of the other three genes were unchanged, indicating that not all of the predicted mRNA targets were affected by the treatment with AAV9-miR-3191-5p in mice (FIG. 32, B to H).

[0255] To determine whether an overall change in whole-gene expression in the mouse brain and cerebellum after AAV9-miR-3191-5p injections leads to significant adverse and toxic effects, we monitored wild-type mice injected with AAV9-miR-3191-5p for 12 months and found no abnormal phenotypes. Also, we found no histopathological abnormalities in the brain, cerebellum, heart, lung, liver, and kidney of wild-type mice injected with AAV9-miR-3191-5p (FIG. 33, A to F). On the basis of these findings, we conclude that AAV9-mediated delivery of miR-3191-5p is a well-tolerated and successful therapeutic approach for treating the disease phenotype in our SCA6 mouse model.

[0256] Discussion

[0257] To explore possible therapeutic strategies for treating SCA6, we developed a robust SCA6 mouse model using AAV9-mediated somatic gene transfer of the CACNA1A second cistron to express α1ACTSCA6 under the control of CACNA1A IRES. We found prominent α1ACTSCA6 expression that was predominantly in cerebral cortex and cerebellum of AAV9-injected mice. Mice injected with AAV9 expressing α1ACTSCA6 showed unambiguous disease phenotypes associated with the pathological and clinical features of patients with SCA6 (2-8) much earlier and more reproducibly than the Purkinje cell-specific promoter-driven transgenic SCA6 mouse model we previously developed (11) or the knock-in SCA6 mouse model with polyQ expansion size observed in patients with SCA6 (9, 10). By immunofluorescence analysis, we found that administration of a total of 1010 vg of AAV9 expressing CACNA1A IRES-driven α1ACTSCA6 into the lateral ventricle caused an ˜50% decrease in the number of Purkinje cells that was sufficient to lead to early-onset ataxia and motor deficits from an early age. These findings indicate that AAV9-mediated CACNA1A IRES-driven α1ACTSCA6 expression is stronger and therefore more toxic in mouse cerebellum than α1ACTSCA6 expression in previously developed SCA6 mouse models (9-11). These early and severe ataxic phenotypes are also observed in Pumiliol-deficient mice, mimicking SCA1, another type of autosomal dominant SCA (30).

[0258] Although we have previously shown that α1ACT functions as a transcription factor essential for cerebellar development (11), the detailed mechanism by which α1ACTSCA6 causes Purkinje cell degeneration in adulthood remains unknown. Because most individuals with SCA6 are heterozygous for the SCA6-causing expansion, that is, they still have one copy of the normal CACNA1A second cistron, they express some levels of the normal α1ACT protein. On the other hand, SCA6 homozygotes that express two copies of mutant α1ACT protein and no normal α1ACT protein develop normally and have nearly the same age of onset as SCA6 heterozygotes (7, 8, 31-33). This confirms that the mutant α1ACT protein fulfills some of the normal α1ACT protein functions in development and that SCA6 arises by a dominant “gain-of-function” mechanism.

[0259] In cell culture experiments, we have discovered that miR-3191-5p directly acts on the CACNA1A IRES to regulate the translation of α1ACT in an Ago4-dependent manner. Previous studies have shown that miRNAs, by forming miRISC with Ago1 or Ago2, block the assembly of translation initiation factors to repress either cap- or IRES-dependent translation through their binding to the 3′UTR of targeted mRNA (18-20). There are four members of the RNA-induced silencing complex-related Ago protein family in human Ago1, Ago2, Ago3, and Ago4 (27). Very little is known about Ago4, although the absence of a catalytic domain suggests that it might have a distinct role in gene silencing compared with Ago2 (34-39). Our data showing that Ago4 interacts with miR-3191-5p and CACNA1A IRES to repress translation of the second cistron may suggest that it has a specific role for the mRNA-sparing translational repression via miRISC, possibly even selectively for the translational repression of IRESs.

[0260] We have also demonstrated that miR-3191-5p bound to Ago4 selectively inhibits the translational initiation of α1ACT by eIFs, eIF4AII and eIF4GII, which enhance α1ACT expression. Although the list of cellular mRNAs that are thought to contain IRESs is growing (17, 40-42), cellular IRESs show little structural relationship to each other, and their underlying mechanism remains largely unknown but is thought to follow the picornavirus paradigm of binding to the eIF4A-eIF4G complex (17). Identification of eIF4AII, which may provide helicase activity, and eIF4GII, which may serve as a scaffold (17, 43-45), in the mechanism of CACNA1A IRES-mediated translation supports recent findings that show the effect of eIFs on cellular IRESs in human disease (40-42). Presumably, in addition to these eIFs, other IRES transacting factors and small RNAs may play a part in the regulation of CACNA1A IRES-mediated translation (17, 40, 42). The recently recognized abundance of IRES-mediated translational mechanisms in the human genome raises the potential for their role in human disease (46).

[0261] We have developed an miRNA-mediated therapy for SCA6 using selective translational blockade of the CACNA1A second cistron in mice. Our findings indicate that continuous inhibition of α1ACTSCA6 expression by the AAV9 vector-mediated delivery of miR-3191-5p has a substantial therapeutic effect on the SCA6 disease phenotype in mice. Considering that an ˜50% decrease in the number of Purkinje cells is sufficient to cause ataxia and motor deficits in our mouse model, miRNA-mediated α1ACTSCA6 silencing by blockade of CACNA1A IRES-driven translation in greater than half of Purkinje cells would have great potential benefit in presymptomatic or symptomatic SCA6 patients (13-15).

[0262] Although AAV9-mediated intervention with miR-3191-5p did not regulate all of the predicted mRNA targets in our mouse model, we showed that miR-3191-5p has a selective silencing effect on the CACNA1A IRES-driven translation of α1ACTSCA6 in mice. Targeting CACNA1A IRES in SCA6 patients through miRNAs or small molecules may down-regulate both normal and mutant α1ACT. However, AAV9-mediated administration of miR-3191-5p into the lateral ventricle did not lead to any toxic effects in mice during long-term observations over 1 year. Other studies in our group also showed that the effect of α1ACT on establishing normal cerebellar development appeared to be irreversible (47).

[0263] There are several limitations to our study. Although patients with SCA6 develop ataxic phenotypes in adulthood (2-8), the targeted expression of α1ACTSCA6 in late adult mouse cerebellum has not been evaluated. Also, the off-target effects due to viral transduction of an miRNA may depend on viral titer and differ among species. A series of reports have suggested that miRNAs may have therapeutic promise for treating cancer, metabolic disease, and inflammation (48-50). However, before miRNAs can have success as therapeutic agents, many challenges remain to be overcome, including their efficient delivery and off-target effects (51, 52). Further studies are needed to validate more efficient and specific targeting strategies to develop an miRNA-based therapy for SCA6 patients in the future.

[0264] Although therapy targeting IRES activity has been a mainstay of antiviral therapy, it has not been used for genetic diseases (53-55). IRES-dependent translation also plays a role in the expression of some oncogenes, such as c-myc (56), L-myc (57), and epidermal growth factor receptor (58), in tumors. Our study opens the door to the development of therapies using a new strategy for the selective suppression of IRES-driven pathogenic gene products based on delivery of disease-specific miRNAs.

### Example 4

[0265] The following example describes the materials and methods used in the study of Example 10.

[0266] Study Design

[0267] Our study was based on our previous findings that SCA6 is attributable to a polyQ repeat expansion within a second CACNA1A gene product, α1ACT, and that α1ACT expression is under the control of an IRES present within the CACNA1A coding region. The objectives of the current study were threefold. The first objective was to develop an early-onset ataxia model using an AAV9-based gene delivery system to express CACNA1A IRES-driven α1ACTSCA6. The second objective was to identify miRNAs that target CACNA1A IRES and preferentially block the CACNA1A IRES-driven translation of α1ACT. Finally, we investigated the therapeutic potential of ectopic miRNA expression for the treatment of SCA6 by AAV9-mediated transduction in our previously developed mouse model of CACNA1A IRES-driven SCA6. On the basis of our previous studies (11, 59), four to six biological replicates were used for each in vitro or in vivo biochemical and histological analysis, whereas a sample size of 12 mice (6 male and 6 female mice) per group was used for behavioral testing. For AAV9 injections, neonatal mice were randomly assigned to treatment conditions with equivalent numbers in each group. All behavioral analyses were performed by experimenters who were blind to the identity of treatment conditions. Data collection and the biochemical and histological analysis for mouse samples were performed with the investigators unaware of the sample identities until statistical analyses. All source data are in the Supplementary Materials (table S1).

[0268] Construction of DNA Plasmids

[0269] We used pcDNA3 vectors expressing CACNA1A-encoded FLAG-tagged peptides (α1A-FLAG and α1ACT-FLAG), a bicistronic CACNA1A IRES reporter vector, and a control reporter vector as described previously (11). We constructed the truncated transgenes of CACNA1A second cistron that lacked the sequence of 5′ upstream from CACNA1A IRES (pcDNA3-IRES-α1ACT vectors; FIG. 24A) and inserted them into AAV9 genomes to prepare AAV9-α1ACT-Q11 and AAV9-α1ACT-Q33 (FIG. 24B). Briefly, the sequence of nucleotides 4962 to 7757 of full-length CACNA1A complementary DNA (cDNA) (NM_001127222.1), corresponding to the sequence of CACNA1A IRES and α1ACT ORF, was amplified using IRES-α1ACT primers [5′-ATCAGGATCCGCCCTCAACACCATCGTGC-3′ (forward)(SEQ ID NO: 186) and 5′-GAATCTAGATTACTTGTCATCG-3′ (reverse) (SEQ ID NO: 187)] from pcDNA3 vectors expressing CACNA1A-encoded FLAG-tagged peptides. The PCR products were inserted into the Bam HI and Xba I sites of pcDNA3 vectors. We also modified the sequence of nucleotides 5013 to 5015 from “TAT” to “TAG” of stop codon (FIG. 24A).

[0270] To obtain mutated CACNA1A IRES transcripts that are resistant to the binding of miR-3191-5p (CACNA1A IRESmut vectors; FIGS. 28, B and C), we performed C-G and G-C substitutions within the predicted miR-3191-5p binding site. We also performed C-G and G-C substitutions within the complementary binding site of the sequence targeted by miR-3191-5p to maintain the stem-loop structure of CACNA1A IRESmut as same as that of the original. Briefly, we amplified the predicted binding site of miR-3191-5p using miR mut primers [5′-ATGTCTCCGCCCCTGGGTCTccccAAcAAcTcTggccCCAGAGTGGCTTACAAGCG-3′ (forward) (SEQ ID NO: 182) and 5′-CGCTTGTAAGCCACTCTGGggccAgAgTTgTTggggAGACCCAGGGGCGGAGACAT-3′ (reverse)(SEQ ID NO: 183)] and the complementary binding site of the sequence targeted by miR-3191-5p using anti-miR mut primers [5′-ACTGAGCACAATAACTTggccAggTTgTTggAGGCCCTCATGCTTCTC-3′ (forward)(SEQ ID NO: 184) and 5′-GAGAAGCATGAGGGCCTccAAcAAccTggccAAGTTATTGTGCTCAGT-3′ (reverse)(SEQ ID NO: 185)]. Subsequently, we annealed PCR products using primers anti-miR mut forward and miR mut reverse and inserted the annealed PCR products into the BIp I sites of pcDNA3 vectors expressing CACNA1A-encoded FLAG-tagged peptides and into the Eco RI and Nco I sites of a bicistronic CACNA1A IRES reporter vector.

[0271] pDEST-GFP-Ago1 (Addgene, plasmid #21534) and pDEST-GFP-Ago4 (Addgene, plasmid #21536) were gifts from E. Chan (60). pEGFP-hAgo2 (Addgene, plasmid #21981) was a gift from P. Sharp (61). pGEX-GST-AGO3 (Addgene, plasmid #24318) was a gift from C. Novina (34). To create pEGFP-AGO3, we restriction-digested pGEX-GST-AGO3 with Eco RI and Bam HI and inserted it into the plasmid backbone of the pEGFP-hAgo2 after Eco RI and Bam HI digestion.

[0272] pcDNA3-HA-eIF4GI and pcDNA3-HA-eIF4GII were gifts from N. Sonenberg (McGill University, Canada) (62). M. Bushell (Medical Research Council, UK) provided us with the plasmids expressing human eIF4AI and eIF4AII (18). pcDNA3.1-HisXpress vector was a gift from T. Cooper (Baylor College of Medicine). From the plasmids expressing human eIF4AI and eIF4AII, we amplified human eIF4AI and eIF4AII cDNAs using eIF4AI-PCR primers [5′-ATCAGGATCCATGTCTGCGAGCCAGGAT-3′ (forward)(SEQ ID NO: 188) and 5′-ATCAGGGCCCAGGTCAGCAACATTGAGG-3′ (reverse)(SEQ ID NO: 189)] and eIF4AII-PCR primers [5′-ATCAGGATCCATGTCTGGTGGCTCCGCG-3′ (forward)(SEQ ID NO: 190) and 5′-ATCAGGGCCCTTAAATAAGGTCAGCCAC-3′ (reverse)(SEQ ID NO: 191)], respectively. Subsequently, we inserted the PCR products into Bam HI- and Apa I-digested pcDNA3.1-HisXpress vectors to obtain pcDNA3.1-HisXpress-eIF4AI and pcDNA3.1-HisXpress-eIF4AII. We used the original, either pcDNA3.1-HisC or pcDNA3-HA, vectors lacking the insertions in the multiple cloning sites as control vectors.

[0273] Cotransfection of DNA Plasmids with Either Synthetic miRNA or siRNA into Cultured Cells

[0274] HEK293 cells were cultured in Dulbecco's modified Eagle's medium supplemented with 10% fetal bovine serum. All miRNAs and siRNAs were purchased from Life Technologies. ID numbers are shown as follows: miR-711 (MC15715), miR-3191-5p (MC23769), miR-4786-3p (MC21295), a negative control miRNA (#4464059), Ago1 (s25500), Ago2 (s25931), Ago3 (s46947), Ago4 (s46949), eIF4AII (s4570), eIF4GII (s16519), and an siRNA negative control (#12935-300).

[0275] We plated HEK293 cells onto six-well dishes and cotransfected each dish with 1.0 μg of the vector expressing the following: bicistronic CACNA1A IRES reporter, bicistronic CACNA1A IRESmut reporter, control reporter, and α1A-FLAG and α1ACT-FLAG; 0.5 μg of the vector expressing the following: eIF4AI, eIF4AII, eIF4GI, and eIF4GII; and either 20 nM synthetic miRNA or 20 nM siRNA molecules. We used Lipofectamine 2000 (Life Technologies) as a transfection reagent in all cases. Neither the miRNA negative control nor the siRNA negative control matched any human mRNA. The transfected cells were cultured for 48 hours before being processed for RNA and protein analysis.

[0276] Luciferase Assay

[0277] HEK293 cells were plated onto six-well dishes and cotransfected with vectors as shown above. Forty-eight hours after cotransfection, the activities of firefly and Renilla luciferase in lysates prepared from transfected cells using the Dual-Luciferase Assay System (Promega) were measured by using a Wallac 1420 VICTOR3 V luminometer with a 1-s integration time (PerkinElmer). The ratio of firefly luciferase to Renilla luciferase activities of a bicistronic CACNA1A IRES reporter vector was normalized to that of a bicistronic control reporter vector.

[0278] Protein Expression Analysis

[0279] We did Western blot analysis as previously described (11, 63). We used the following primary antibodies: FLAG-specific antibody (1:5000, A8592 and 1:5000, F1804; Sigma-Aldrich); Ago1-specific antibody (1:2000, 9388S; Cell Signaling Technology); Ago2-specific antibody (1:2000, SAB4200085; Sigma-Aldrich); Ago3-specific antibody (1:2000, 5054S; Cell Signaling Technology); Ago4-specific antibody (1:2000, 6913S; Cell Signaling Technology); eIF4AII-specific antibody (1:2000, ab31218; Abcam); eIF4GII-specific antibody (1:1000, sc-100732; Santa Cruz Biotechnology); GFP-specific antibody (1:2000, M048-3; MBL); and GAPDH-specific antibody (1:5000, AM4300; Life Technologies). We used NIH ImageJ software to quantify the specific expression of individual proteins and demonstrated the relative signal intensities of individual proteins normalized to those of GAPDH in each sample.

[0280] Quantitative Real-Time Polymerase Chain Reaction

[0281] The total RNA was extracted from HEK293 cells and the cerebellum of mice using the miRNeasy Mini Kit (Qiagen) and reverse-transcribed using the SuperScript VILO (Life Technologies) for mRNA and NCode VILO (Life Technologies) for miRNA. The cDNAs were then used for real-time PCR using the iQ SYBR Green Supermix (Bio-Rad Laboratories). We did the amplification, detection, and data analysis using a Bio-Rad iCycler system (Bio-Rad Laboratories). The crossing threshold values for the mRNAs of the individual genes were normalized to β-actin. The crossing threshold values for miR-3191-5p were normalized to U6 small nuclear RNA. Changes in the expression of mRNA and miRNA were expressed as a fold change relative to the control. We used the following primers. The sequences of the hsa-CACNA1A primers were 5′-GTCTGGGGAAGAAGTGTCCG-3′ (forward) (SEQ ID NO: 192) and 5′-GCTCCTCCCTTGGCAATCTT-3′ (reverse) (SEQ ID NO: 193). These hsa-CACNA1A primers discriminated between the human CACNA1A mRNA and the mouse CACNA1A mRNA. The sequences of the hsa-IRES-α1ACT primers were 5′-GTACCTCACCCGAGACTCCT-3′ (forward) (SEQ ID NO: 207) and 5′-CGGACACTTCTTCCCCAGAC-3′ (reverse) (SEQ ID NO: 208). These primers can also detect the mouse endogenous CACNA1A mRNA. The sequences of the hsa-β-actin primers were 5′-GCGGGAAATCGTGCGTGACATT-3′ (forward) (SEQ ID NO: 196) and 5′-GATGGAGTTGAAGGTAGTTTCGTG-3′ (reverse) (SEQ ID NO: 197). The sequences of the mmu-Prx primers were 5′-TTGGTGGAGATTATCGTGGAG-3′ (forward) (SEQ ID NO: 209) and 5′-TCTTGCAAGCTGAGGCTCTTA-3′ (reverse) (SEQ ID NO: 210). The sequences of the mmu-Zfp781 primers were 5′-CCTATGAGGATGTGCATGTGA-3′ (forward) (SEQ ID NO: 211) and 5′-TGGGGTCCAGAGTGACAGATA-3′ (reverse) (SEQ ID NO: 212). The sequences of the mmu-4930407I10Rik primers were 5′-GAATTCCCAAGGGCTAAAGTG-3′ (forward) (SEQ ID NO: 213) and 5′-TTTCACACCATCTCCACTTCC-3′ (reverse) (SEQ ID NO: 214). The sequences of the mmu-Zfp612 primers were 5′-AAGGCAGCCCTCAAGTTAATC-3′ (forward) (SEQ ID NO: 215) and 5′-AAGTCTCTGATGCCAGACGAA-3′ (reverse) (SEQ ID NO: 216). The sequences of the mmu-Zfp286 primers were 5′-CATGGAAACCAGACCTGAGAG-3′ (forward) (SEQ ID NO: 217) and 5′-ACGCTCACATTCAAGAGCAGT-3′ (reverse) (SEQ ID NO: 218). The sequences of the mmu-Erbb4 primers were 5′-CGCTAGAACTCCACTGATTGC-3′ (forward) (SEQ ID NO: 219). and 5′-TACCAGCTCTGTCTCCAGGAA-3′ (reverse) (SEQ ID NO: 220). The sequences of the mmu-Ptbp1 primers were 5′-TCACCAAGAACAACCAGTTCC-3′ (forward) (SEQ ID NO: 221) and 5′-GTGAGCTTGGAGAAGTCGATG-3′ (reverse) (SEQ ID NO: 222). The sequences of the mmu-β-actin primers were 5′-GCTACAGCTTCACCACCACA-3′ (forward) (SEQ ID NO: 198) and 5′-TCTCCAGGGAGGAAGAGGAT-3′ (reverse) (SEQ ID NO: 199). The sequences of the miR-3191-5p primers were 5′-GCTCTCTGGCCGTCTAC-3′ (forward) (SEQ ID NO: 200) and 5′-GTCCAGTTTTTTTTTTTTTTTGGAAG-3′ (reverse) (SEQ ID NO: 201). The sequences of the U6 small nuclear RNA primers were 5′-CTTCGGCAGCACATATACTAAA-3′ (forward) (SEQ ID NO: 202) and 5′-AAAATATGGAACGCTTCACG-3′ (reverse) (SEQ ID NO: 203). We designed the miR-3191-5p primers using a bioinformatics program (64).

[0282] Coimmunoprecipitation

[0283] We plated HEK293 cells onto 100-mm dishes and cotransfected each dish with 3.0m of the vectors expressing eIF4AII and eIF4GII. Forty-eight hours after transfection, we harvested HEK293 cells for immunoprecipitation using eIF4AII-specific antibody (5 μg per sample, ab31218; Abcam), eIF4GII-specific antibody (5 μg per sample, sc-100732; Santa Cruz Biotechnology), and Dynabeads Protein G Immunoprecipitation Kit (Life Technologies) according to the manufacturer's suggested protocols. A rabbit IgG (5 μg per sample, PP64B; Millipore) and mouse IgG (5 μg per sample, CS200621; Millipore) were used as controls.

[0284] Immunoprecipitation-Coupled qRT-PCR

[0285] We plated HEK293 cells onto 100-mm dishes and cotransfected each dish with 2.0m of the vector expressing the following: full-length CACNA1A-Q33-encoded FLAG-tagged peptides, IRES-α1ACT-Q33, miR-3191-5p (SC401396; OriGene), Ago1, Ago2, Ago3, Ago4, eIF4AII, and eIF4GII. Forty-eight hours after transfection, we harvested HEK293 cells for coimmunoprecipitation using Ago1-specific antibody (5 μg per sample, 9388S; Cell Signaling Technology), Ago2-specific antibody (5 μg per sample, 2897S; Cell Signaling Technology), Ago3-specific antibody (5 μg per sample, 5054S; Cell Signaling Technology), Ago4-specific antibody (5 μg per sample, 6913S; Cell Signaling Technology), eIF4AII-specific antibody (5 μg per sample, ab31218; Abcam), eIF4GII-specific antibody (5 μg per sample, sc-100732; Santa Cruz Biotechnology), and Magna RIP RNA-Binding Protein Immunoprecipitation Kit (Millipore) according to the manufacturer's suggested protocols. A rabbit IgG (5 μg per sample, PP64B; Millipore) and mouse IgG (5 μg per sample, CS200621; Millipore) supplied by the manufacturer were used as controls. The immunoprecipitated RNA was reverse-transcribed using SuperScript VILO (Life Technologies) for mRNA and NCode VILO (Life Technologies) for miRNA and analyzed by qRT-PCR for the differential expression of CACNA1A-Q33 mRNA and IRES-α1ACT-Q33 mRNA using the following primers: 5′-GTCTGGGGAAGAAGTGTCCG-3′ (forward) (SEQ ID NO: 192) and 5′-GCTCCTCCCTTGGCAATCTT-3′ (reverse) (SEQ ID NO: 193), and miR-3191-5p, 5′-GCTCTCTGGCCGTCTAC-3′ (forward) (SEQ ID NO: 200) and 5′-GTCCAGTTTTTTTTTTTTTTTGGAAG-3′ (reverse) (SEQ ID NO: 201). We also extracted RNA and protein complex from the cerebellum of AAV9-injected mice and harvested them for coimmunoprecipitation as same as shown above.

[0286] Development of the AAV9 Vectors

[0287] The AAV9 vector plasmids contained an expression cassette, consisting of a human cytomegalovirus immediate-early promoter followed by cDNA encoding gene of our interest as shown below, woodchuck hepatitis virus posttranscriptional regulatory element (WPRE), and a simian virus 40 polyadenylation signal sequence between the inverted terminal repeats of the AAV3 genome. The AAV9 vectors expressing α1ACT with either normal CAG repeat size (AAV9-α1ACT-Q11) or mutant CAG repeat size (AAV9-α1ACT-Q33) contained the truncated transgenes of CACNA1A corresponding to the sequence of CACNA1A IRES and α1ACT ORF (IRES-α1ACT; FIGS. 24, A and B). AAV9-GFP contained cDNA encoding GFP sequence. AAV9-miR-3191-5p contained cDNA encoding GFP and miR-3191-5p sequence (FIG. 30A). AAV9-miR-mock contained cDNA encoding GFP and the miR-mock sequence (FIG. 30A). The sequences of miR-3191-5p and miR-mock are 5′-GGGGTCACCTCTCTGGCCGTCTACCTTCCACACTGACAAGGGCCGTGGGGACGTA GCTGGCCAGACAGGTGACCCC-3′ (miR-3191-5p) (SEQ ID NO: 181) and 5′-GTATTGCGTCTGTACACTCACCGTTTTGGCCACTGACTGACGGTGAGTGCAGACG CAATA-3′ (miR-mock) (SEQ ID NO: 206).

[0288] We synthesized the AAV9 vp cDNA as previously described with the substitution of thymidine for adenine 1337, which introduced an amino acid change from tyrosine to phenylalanine at position 446 (65). Recombinant AAV9 vectors were produced by transient transfection into HEK293 cells using the vector plasmid, an AAV3 rep and AAV9 vp expression plasmid, and the adenoviral helper plasmid pHelper (Agilent Technologies). We purified the recombinant viruses by isolation from two sequential continuous CsCl gradients, and the viral titers were determined by qRT-PCR as follows: 40 cycles of 95° C./15 s, 60° C./30 s, 72° C./90 s, and 75° C./15 s with WPRE forward primer (5′-ATTGCTTCCCGTATGGCTTTCA-3′) (SEQ ID NO: 223) and WPRE reverse primer (5′-TCAGCAAACACAGTGCACACCA-3′) (SEQ ID NO: 224) to amplify the sequence of nucleotides 1319 to 1201 of woodchuck hepatitis virus 2.

[0289] Injection of AAV9 into the Ventricle of Neonatal Wild-Type Mice

[0290] The C57/BL6J mice were purchased from Jackson Laboratory and maintained in our breeding colony. At postnatal day 1, neonatal C57/BL6J mice were individually anesthetized on ice, and a total of 1010 vg in 2 to 4 μl of AAV9 solution were injected into the right lateral ventricle of neonatal C57/BL6J mice with a 10-μl Hamilton syringe attached to a 32-gauge needle (Hamilton Company). The viral solution contained 0.04% trypan blue (Sigma-Aldrich) to help determine whether the ventricles were indeed injected. Only those neonatal C57/BL6J mice in which the lateral ventricles were filled with viral solution were analyzed. Six male and six female mice were enrolled into each group: two groups of AAV9-GFP mice, AAV9-α1ACT-Q11 mice, AAV9-α1ACT-Q33 mice, AAV9-Q33-miR-mock mice, and AAV9-Q33-miR-3191-5p mice. All animal experiments were approved and carried out in accordance with the regulations and guidelines for the care and use of experimental animals at the Institutional Animal Care and Use Committee of the University of Chicago.

[0291] Injection of AAV9 into the Ventricle of Neonatal Wild-Type Mice

[0292] The C57/BL6J mice were purchased from Jackson Laboratory and maintained in our breeding colony. At postnatal day 1, neonatal C57/BL6J mice were individually anesthetized on ice, and a total of 1010 vg in 2 to 4 μl of AAV9 solution were injected into the right lateral ventricle of neonatal C57/BL6J mice with a 10-μl Hamilton syringe attached to a 32-gauge needle (Hamilton Company). The viral solution contained 0.04% trypan blue (Sigma-Aldrich) to help determine whether the ventricles were indeed injected. Only those neonatal C57/BL6J mice in which the lateral ventricles were filled with viral solution were analyzed. Six male and six female mice were enrolled into each group: two groups of AAV9-GFP mice, AAV9-α1ACT-Q11 mice, AAV9-α1ACT-Q33 mice, AAV9-Q33-miR-mock mice, and AAV9-Q33-miR-3191-5p mice. All animal experiments were approved and carried out in accordance with the regulations and guidelines for the care and use of experimental animals at the Institutional Animal Care and Use Committee of the University of Chicago.

[0293] The Behavioral Assessments of AAV9-Injected Mice

[0294] We examined the behavioral assessments of AAV9-injected mice at 4, 8, 12, and 30 weeks of age. The investigators who carried out the behavioral assessments were blinded to the treatment conditions.

[0295] Rotarod. We analyzed rotarod test of mice using Economex Rotarod (Columbus Instruments) with accelerating mode (4 to 40 rpm, acceleration with 0.1 rpm per 0.8 s). We performed three consecutive trials with 10-min intervals between each trial.

[0296] Open-field assay. We examined open-field assay using Mouse Open Field Arena and 48 Channel IR Controller for Open Field Activity (ENV-510 and ENV-520, Med Associates Inc.). Briefly, mice were placed in the center of the open-field area, and their movements were monitored through the side-mounted photobeams for 30 min. We analyzed multiple parameters using Activity Monitor software (Med Associates Inc.) and adopted total distance traveled to assess the activity of each mouse.

[0297] DigiGait analysis. We also examined a video-assisted computerized treadmill for mouse gait analysis using a DigiGait with DigiGait software (Mouse Specifics). All mice were tested at the speed of 25 cm/s.

[0298] Immunohistochemistry, Immunofluorescence, and Histopathology

[0299] Immunofluorescence was performed as previously described (11, 59) except as modified below. We cut paraffin-embedded sagittally oriented 5-μm sections of mouse brains and cerebellums at 20-μm intervals. We used comparable sections from vermis, medial hemisphere, and lateral hemisphere for staining and histopathological assessments. Paraffin-embedded sections of perfused brains and cerebellums were dewaxed, rehydrated, and then steamed for 20 min in antigen retrieval solution (Reveal, Biocare Medical). Sections were blocked and exposed to primary antibodies for 12 hours at 4° C. After washing, fluorescent secondary antibodies in phosphate-buffered saline and 0.05% Tween 20 were added for 1 hour at room temperature. Confocal fluorescence images were captured with a Leica TCS SP2 laser scanning confocal microscope (Leica Microsystems Inc.).

[0300] We used NIH ImageJ software to quantify the FLAG and GFP expression in each section and demonstrated the relative signal intensities of the FLAG and GFP fluorescence per unit area of the mouse hippocampus, cerebral cortex, and cerebellum in each section. The molecular layer thickness and density of Purkinje dendritic trees were calculated as previously described (11, 66). We selected Purkinje cells well stained with GFP- and FLAG-specific antibodies, indicating well transduced with AAV9, and analyzed Purkinje cells (100 to 250 cells per sample) in the entire area of each section to calculate the mean of the density of Purkinje dendritic trees. The dendritic trees of the captured Purkinje cell image and the area enclosed were outlined and measured using NIH ImageJ software. We also calculated the number of Purkinje cells (100 to 250 cells per sample) in the entire area of each section and expressed the results as the number per 250 μm.

[0301] We used the following primary antibodies: FLAG-specific antibody (1:200, F1804 and 1:200, F7425; Sigma-Aldrich), GFP-specific antibody (1:200, M048-3; MBL), and calbindin-specific antibody (1:200, CB38a; Swant). Goat Alexa Fluor-conjugated anti-mouse and goat Alexa Fluor-conjugated anti-rabbit IgG antibodies (Life Technologies) were used for secondary fluorescence detection. For the tissue sections stained with hematoxylin and eosin, digital image files were created with a 3D Histech Pannoramic Scan whole slide scanner (PerkinElmer) with a Stingray F146C color camera (Allied Vision Technologies). Individual images were analyzed using the 3D Histech Pannoramic Viewer software (PerkinElmer).

[0302] Statistical Analysis

[0303] Statistical analysis was performed using ANOVA and Student's t test, unless specified, with the IBM SPSS Statistics 23.0. Two-tailed unpaired t test was used to compare two conditions. One-way ANOVA was used for comparison among multiple experimental conditions. Bonferroni post hoc test was used when comparing among each condition. For the analysis of mouse body weight and rotarod performance, two-way ANOVA was used for comparison among groups. All data represent means±SEM. Statistical significance in figures: *P<0.05, **P<0.01, ***P<0.001.

### REFERENCES

[0304] The following represents a listing of the references cited in Examples 1 and 2.
[0305] 1. A. R. La Spada, et al., Nature Rev. Genet. 11, 247-258 (2010).
[0306] 2. O. Zhuchenko et al., Nat. Genet. 15, 62-69 (1997).
[0307] 3. K. Craig, et al., Annals of Neurology 55, 752-755 (2004).
[0308] 4. C. M. Gomez et al., Annals of Neurology 42, 933-950 (1997).
[0309] 5. T. Ikeuchi et al., Annals of Neurology 42, 879-884 (1997).
[0310] 6. Z. Matsuyama et al., Hum. Mol. Genet. 6, 1283-1287 (1997).
[0311] 7. K. Watase et al., Proc. Natl. Acad. Sci. USA. 105, 11987-11992 (2008).
[0312] 8. H. Saegusa et al., Mol. Cell Neurosci. 34, 261-270 (2007).
[0313] 9. X. Du et al., Cell 154, 118-133 (2013).
[0314] 10. K. Jun et al., Proc. Natl. Acad. Sci. USA. 96, 15245-15250 (1999).
[0315] 11. V. N. Kim, et al., Nature Rev. Mol. Cell Biol. 10, 126-139 (2009).
[0316] 12. R. J. Jackson, et al., Nature Rev. Mol. Cell Biol. 11, 113-127 (2010).
[0317] 13. H. A. Meijer et al., Science 340, 82-85 (2013).
[0318] 14. T. Fukaya, et al., Mol. Cell 56, 67-78 (2014).
[0319] 15. A. Fukao et al., Mol. Cell 56, 79-89 (2014).
[0320] 16. J. R. Lytle, et al., Proc. Natl. Acad. Sci. USA. 104, 9667-9672 (2007).
[0321] 17. A. Kumar, et al., Genomics 100, 352-356 (2012).
[0322] 18. C. Shin, et al., Mol. Cell 38, 789-802 (2010).
[0323] 19. K. Sato, et al., Nucleic Acids Res. 37, W277-80 (2009).
[0324] 20. B. L. Davidson, et al., Nature Rev. Genet. 12, 329-340 (2011).
[0325] 21. R. Kole, et al., Nature Rev. Drug Discov. 11, 125-140 (2012).
[0326] 22. L. Peters, G. Meister, Mol. Cell 26, 611-623 (2007).
[0327] 23. J. Liu et al., Science 305, 1437-1441 (2004).
[0328] 24. G. Meister, et al., Mol. Cell 15, 185-197 (2004).
[0329] 25. R. M. Ewing et al., Mol. Syst. Biol. 3, 89 (2007).
[0330] 26. P. C. Havugimana et al., Cell 150, 1068-1081 (2012).
[0331] 27. Z. S. Karaa, et al., RNA. 15, 249-254 (2009).
[0332] 28. P. J. Hanson, et al., Front. Microbiol. 3, 92 (2012).
[0333] 29. B. Wang, et al., Nat. Struct. Mol. Biol. 16, 1259-1266 (2009).
[0334] 30. P. K. Juvvuna, et al., Nucleic Acids Res. 40, 6808-6820 (2012).
[0335] 31. N. Wei et al., PLoS One 7, e49309 (2012).
[0336] 32. P. N. Valdmanis, et al., Nucleic Acids Res. 40, 3704-3713 (2012).
[0337] 33. S. Gu, et al., Curr. Biol. 22, 1536-1542 (2012).
[0338] 34. J. Hauptmann, et al., RNA. 20, 1532-1538 (2014).
[0339] 35. A. Dasgupta, et al., FEMS Microbiol. Lett. 234, 189-199 (2004).
[0340] 36. A. V. Gasparian et al., J. Virol. 84, 9390-9397 (2010).
[0341] 37. D. R. Davis, P. P. Seth, Antivir. Chem. Chemother. 21, 117-128 (2011).
[0342] 38. S. L. Lian, et al., RNA. 15, 804-813 (2009).
[0343] 39. A. Gradi et al., Mol. Cell Biol. 18, 334-342 (1998).
[0344] 40. Y. Miyazaki et al., Nat. Med. 18, 1136-1141 (2012).
[0345] 41. P. K. Busk, BMC Bioinformatics 15, 29 (2014).
[0346] 42. A. Iida, et al., Biomed. Res. Int. 2013, 974819 (2013).
[0347] 43. H. B. Kordasiewicz, et al., Hum. Mol. Genet. 15, 1587-1599 (2006).
[0348] 44. T. Miyazaki, M. Watanabe, Anat. Sci. Int. 86, 10-18 (2011).

[0349] The following references are cited in Examples 3 and 4.
[0350] 1. La Spada, J. P. Taylor, Nat. Rev. Genet. 11, 247-258 (2010).
[0351] 2. Paulson, J. Neuroophthalmol. 29, 227-237 (2009).
[0352] 3. Dun, Lancet Neurol. 9, 885-894 (2010).
[0353] 4. Zhuchenko et al., Nat. Genet. 15, 62-69 (1997).
[0354] 5. Craig, Ann. Neurol. 55, 752-755 (2004).
[0355] 6. Gomez, et al., Ann. Neurol. 42, 933-950 (1997).
[0356] 7. Ikeuchi, et al., Ann. Neurol. 42, 879-884 (1997).
[0357] 8. Matsuyama, et al., Hum. Mol. Genet. 6, 1283-1287 (1997).
[0358] 9. Watase, et al., Proc. Natl. Acad. Sci. U.S.A. 105, 11987-11992 (2008).
[0359] 10. Saegusa, Mol. Cell. Neurosci. 34, 261-270 (2007).
[0360] 11. Du, Cell 154, 118-133 (2013).
[0361] 12. Jun, et al., Proc. Natl. Acad. Sci. U.S.A. 96, 15245-15250 (1999).
[0362] 13. Seidel, et al., Acta Neuropathol. 124, 1-21 (2012).
[0363] 14. Rub, et al., Prog. Neurobiol. 104, 38-66 (2013).
[0364] 15. Ishiguro, et al, Acta Neuropathol. 119, 447-464 (2010).
[0365] 16. Kim, et al., Nat. Rev. Mol. Cell Biol. 10, 126-139 (2009).
[0366] 17. Jackson, et al., Nat. Rev. Mol. Cell Biol. 11, 113-127 (2010).
[0367] 18. Meijer, et al., Science 340, 82-85 (2013).
[0368] 19. Fukaya, et al., Mol. Cell 56, 67-78 (2014).
[0369] 20. Fukao, et al., Mol. Cell 56, 79-89 (2014).
[0370] 21. Lytle, et al., Proc. Natl. Acad. Sci. U.S.A. 104, 9667-9672 (2007).
[0371] 22. Kumar, et al., Genomics 100, 352-356 (2012).
[0372] 23. Shin, et al., Mol. Cell 38, 789-802 (2010).
[0373] 24. Sato, et al., Nucleic Acids Res. 37, W277-W280 (2009).
[0374] 25. Davidson, et al., Nat. Rev. Genet. 12, 329-340 (2011).
[0375] 26. Kole, et al., Nat. Rev. Drug Discov. 11, 125-140 (2012).
[0376] 27. Peters and Meister, Mol. Cell 26, 611-623 (2007).
[0377] 28. Liu, et al., RNAi. Science 305, 1437-1441 (2004).
[0378] 29. Meister, et al., Mol. Cell 15, 185-197 (2004).
[0379] 30. Gennarino, et al., Cell 160, 1087-1098 (2015).
[0380] 31. Geschwind, et al., Neurology 49, 1247-1251 (1997).
[0381] 32. Matsumura, Neurology 49, 1238-1243 (1997).
[0382] 33. Takiyama, J. Neurol. Sci. 158, 141-147 (1998).
[0383] 34. Wang, et al., Nat. Struct. Mol. Biol. 16, 1259-1266 (2009).
[0384] 35. Juvvuna, et al., Nucleic Acids Res. 40, 6808-6820 (2012).
[0385] 36. Wei, et al., PLOS One 7, e49309 (2012).
[0386] 37. Valdmanis, et al., Nucleic Acids Res. 40, 3704-3713 (2012).
[0387] 38. Gu, et al., Curr. Biol. 22, 1536-1542 (2012).
[0388] 39. Hauptmann, et al., RNA 20, 1532-1538 (2014).
[0389] 40. Tsai, et al., Open Biol. 4, 140180 (2014).
[0390] 41. Weingarten-Gabbay, Oncogene 33, 611-618 (2014).
[0391] 42. Khosrow et al., Am. J. Physiol. Endocrinol. Metab. 301, E1051-E1064 (2011).
[0392] 43. Pestova, et al., Mol. Cell. Biol. 16, 6859-6869 (1996).
[0393] 44. Pestova, et al., Mol. Cell. Biol. 16, 6870-6878 (1996).
[0394] 45. de Breyne, et al., Proc. Natl. Acad. Sci. U.S.A. 106, 9197-9202 (2009).
[0395] 46. Weingarten-Gabbay, et al., Science 351, aad4939 (2016).
[0396] 47. Gomez, Two Proteins Encoded by the CACNA1A Gene and Their Role in Cerebellar Development and Disease, Cerebellum Gordon Research Conference, Lewiston, Me., Aug. 12, 2015.
[0397] 48. A. F. brahim, et al., Cancer Res. 71, 5214-5224 (2011).
[0398] 49. van Rooij, et al., Circ. Res. 110, 496-507 (2012).
[0399] 50. Najafi-Shoushtari, et al., Science 328, 1566-1569 (2010).
[0400] 51. Burnett, et al., Chem. Biol. 19, 60-71 (2012).
[0401] 52. Zhang, et al., Nat. Commun. 7, 10376 (2016).
[0402] 53. Dasgupta, et al., FEMS Microbiol. Lett. 234, 189-199 (2004).
[0403] 54. Gasparian, et al., J. Virol. 84, 9390-9397 (2010).
[0404] 55. Davis, et al., Antivir. Chem. Chemother. 21, 117-128 (2011).
[0405] 56. Stoneley, et al., Nucleic Acids Res. 28, 687-694 (2000).
[0406] 57. Jopling, et al., RNA 10, 287-298 (2004).
[0407] 58. Webb, et al., Oncogenesis 4, e134 (2015).
[0408] 59. Kordasiewicz, et al., Hum. Mol. Genet. 15, 1587-1599 (2006).
[0409] 60. Lian, et al., RNA 15, 804-813 (2009).
[0410] 61. Leung, et al., Proc. Natl. Acad. Sci. U.S.A. 103, 18125-18130 (2006).
[0411] 62. Gradi, et al., Mol. Cell. Biol. 18, 334-342 (1998).
[0412] 63. Miyazaki, et al., Nat. Med. 18, 1136-1141 (2012).
[0413] 64. Busk, Z M C Bioinformatics 15, 29 (2014).
[0414] 65. Iida, et al., Biomed Res. Int. 2013, 974819 (2013).
[0415] 66. Miyazaki and Watanabe, Anat. Sci. Int. 86, 10-18 (2011).

[0416] All references, including publications, patent applications, and patents, cited herein are hereby incorporated by reference to the same extent as if each reference were individually and specifically indicated to be incorporated by reference and were set forth in its entirety herein.

[0417] The use of the terms “a” and “an” and “the” and similar referents in the context of describing the invention (especially in the context of the following claims) are to be construed to cover both the singular and the plural, unless otherwise indicated herein or clearly contradicted by context. The terms “comprising,” “having,” “including,” and “containing” are to be construed as open-ended terms (i.e., meaning “including, but not limited to,”) unless otherwise noted.

[0418] Recitation of ranges of values herein are merely intended to serve as a shorthand method of referring individually to each separate value falling within the range and each endpoint, unless otherwise indicated herein, and each separate value and endpoint is incorporated into the specification as if it were individually recited herein.

[0419] All methods described herein can be performed in any suitable order unless otherwise indicated herein or otherwise clearly contradicted by context. The use of any and all examples, or exemplary language (e.g., “such as”) provided herein, is intended merely to better illuminate the invention and does not pose a limitation on the scope of the invention unless otherwise claimed. No language in the specification should be construed as indicating any non-claimed element as essential to the practice of the invention.

[0420] Preferred embodiments of this invention are described herein, including the best mode known to the inventors for carrying out the invention. Variations of those preferred embodiments may become apparent to those of ordinary skill in the art upon reading the foregoing description. The inventors expect skilled artisans to employ such variations as appropriate, and the inventors intend for the invention to be practiced otherwise than as specifically described herein. Accordingly, this invention includes all modifications and equivalents of the subject matter recited in the claims appended hereto as permitted by applicable law. Moreover, any combination of the above-described elements in all possible variations thereof is encompassed by the invention unless otherwise indicated herein or otherwise clearly contradicted by context.

What is claimed is:

1. A method of treating spinocerebellar ataxia Type 6 (SCA6) in a subject in need thereof, comprising the step of administering to the subject (i) an antisense molecule, (ii) a vector encoding the antisense molecule, (iii) a cell comprising the vector or antisense molecule, (iv) a extracellular vesicle comprising the antisense molecule, or (v) a combination thereof, wherein the antisense molecule binds to a portion of an IRES of a CACNA1A gene comprising the sequence of SEQ ID NO: 180, optionally, wherein the antisense molecule binds to Argonaute 4 (Ago4), optionally, wherein the vector is a recombinant expression vector of any one of claims 18 to 28, wherein the cell is a cell of claim 30, or the extracellular vesicle is an extracellular vesicle of claim 29.

2. The method of claim 1, wherein the antisense molecule is an microRNA (miRNA), a pri-miRNA, or a pre-miRNA.

3. The method of claim 1 or 2, wherein the antisense molecule comprises the sequence of SEQ ID NO: 179.

4. The method of any one of claims 1 to 3, wherein the vector comprises a nucleotide sequence encoding a miRNA, optionally, wherein the miRNA comprises the sequence of SEQ ID NO: 179.

5. The method of claim 4, wherein the nucleotide sequence comprises of SEQ ID NO: 181.

6. The method of any one of claims 1 to 5, wherein the antisense molecule is an antisense nucleic acid analog comprising the base sequence of SEQ ID NO: 179.

7. The method of any one of claims 1 to 6, wherein the cell or extracellular vesicle is autologous to the subject.

8. A method of treating a subject with a predisposition to spinocerebellar ataxia Type 6 (SCA6), comprising the step of administering to the subject (i) an antisense molecule, (ii) a vector encoding the antisense molecule, (iii) a cell comprising the vector or antisense molecule, (iv) a extracellular vesicle comprising the antisense molecule, or (v) a combination thereof, wherein the antisense molecule binds to a portion of an IRES of a CACNA1A gene comprising the sequence of SEQ ID NO: 180, optionally, wherein the antisense molecule binds to Argonaute 4 (Ago4), optionally, wherein the vector is a recombinant expression vector of any one of claims 18 to 28, wherein the cell is a cell of claim 30, or the extracellular vesicle is an extracellular vesicle of claim 29.

9. The method of claim 8, wherein the antisense molecule is an microRNA (miRNA), a pri-miRNA, or a pre-miRNA.

10. The method of claim 8 or 9, wherein the antisense molecule comprises the sequence of SEQ ID NO: 179.

11. The method of any one of claims 8 to 10, wherein the vector comprises a nucleotide sequence encoding a miRNA, optionally, wherein the miRNA comprises the sequence of SEQ ID NO: 179.

12. The method of claim 11, wherein the nucleotide sequence comprises of SEQ ID NO: 181.

13. The method of any one of claims 8 to 12, wherein the antisense molecule is an antisense nucleic acid analog comprising the base sequence of SEQ ID NO: 179.

14. The method of any one of claims 8 to 13, wherein the cell or extracellular vesicle is autologous to the subject.

15. A synthetic antisense molecule which specifically binds to a portion of an IRES of a CACNA1A gene comprising the sequence of SEQ ID NO: 180 comprising at least one non-naturally occurring nucleotide or at least one non-naturally occurring internucleotide linkage, optionally, wherein the synthetic antisense molecule binds to Argonaute 4 (Ago4).

16. The synthetic antisense molecule of claim 15, which is a synthetic microRNA (miRNA), a synthetic pri-miRNA, or a synthetic pre-miRNA.

17. The synthetic antisense molecule of claim 15 or 16, wherein the synthetic antisense molecule comprises the sequence of SEQ ID NO: 179.

18. A recombinant expression vector comprising a nucleotide sequence encoding an antisense molecule which specifically binds to a portion of an IRES of a CACNA1A gene comprising the sequence of SEQ ID NO: 180, optionally, wherein the antisense molecule binds to Argonaute 4 (Ago4).

19. The recombinant expression vector of claim 18, an microRNA (miRNA), a pri-miRNA, or a pre-miRNA.

20. The recombinant expression vector of claim 18 or 19, wherein the antisense molecule comprises the sequence of SEQ ID NO: 179.

21. The recombinant expression vector of any one of claims 18 to 20, comprising a nucleotide sequence encoding a miRNA, optionally, wherein the miRNA comprises the sequence of SEQ ID NO: 179.

22. The recombinant expression vector of any one of claims 18 to 21, wherein the nucleotide sequence comprises of SEQ ID NO: 181.

23. The recombinant expression vector of any one of claims 18 to 22, which is an recombinant adeno-associated viral (AAV) vector.

24. The recombinant expression vector of claim 23, wherein the recombinant AAV vector is an AAV serotype 9 vector.

25. The recombinant expression vector of claim 23 or 24, wherein the recombinant AAV vector comprises one or more of a promoter, a pair of inverted terminal repeats (ITRs), and a polyadenylation signal sequence.

26. The recombinant expression vector of claim 25, wherein (i) the promoter is a human cytomegalovirus (CMV) immediate early promoter, (ii) the ITRs are AAV ITRs, (iii) the polyadenylation signal sequence is an simian virus 40 (SV40) polyadenylation signal sequence, or (iv) a combination thereof.

27. The recombinant expression vector of any one of claims 23 to 26, comprising a woodchuck hepatitis virus posttranscriptional regulatory element (WPRE).

28. The recombinant expression vector of claim 27, comprising an ITR upstream of the human CMV immediate early promoter, which is located upstream of the nucleotide sequence encoding the antisense molecule, which is located upstream of the WPRE which is located upstream of the SV40 polyadenylation signal sequence which is located upstream of the other ITR.

29. An extracellular vesicle comprising (i) an antisense molecule which specifically binds to a portion of an IRES of a CACNA1A gene comprising the sequence of SEQ ID NO: 180, a synthetic antisense molecule of any one of claims 15 to 17, a recombinant expression vector of any one of claims 18 to 28, or a combination thereof, optionally, wherein the antisense molecule binds to Argonaute 4 (Ago4).

30. A cell comprising (i) an antisense molecule which specifically binds to a portion of an IRES of a CACNA1A gene comprising the sequence of SEQ ID NO: 180, (ii) the recombinant expression vector of any one of claims 18-28, (iii) an extracellular vesicle of claim 29, or (iv) a combination thereof, optionally, wherein the antisense molecule binds to Argonaute 4 (Ago4).

31. A population of cells comprising at least one cell of claim 30.

32. The extracellular vesicle of claim 29, cell of claim 30, or population of claim 31, wherein the antisense molecule comprises the sequence of SEQ ID NO: 179.

33. A pharmaceutical composition comprising (i) an antisense molecule, (ii) a vector encoding the antisense molecule, (iii) a cell comprising the vector or antisense molecule, (iv) a extracellular vesicle comprising the antisense molecule, or (v) a combination thereof, wherein the antisense molecule binds to a portion of an IRES of a CACNA1A gene comprising the sequence of SEQ ID NO: 180, and a pharmaceutically acceptable carrier, diluent, or excipient, wherein the pharmaceutically acceptable carrier, diluent, or excipient is synthetic, when the antisense molecule, cell, or extracellular vesicle is naturally-occurring, optionally, wherein the antisense molecule binds to Argonaute 4 (Ago4), optionally, wherein the vector is a recombinant expression vector of any one of claims 18 to 28, wherein the cell is a cell of claim 30, or the extracellular vesicle is an extracellular vesicle of claim 29.

34. The pharmaceutical composition of claim 33, wherein the antisense molecule is an microRNA (miRNA), a pri-miRNA, or a pre-miRNA.

35. The pharmaceutical composition of claim 33 or 34, wherein the antisense molecule comprises the sequence of SEQ ID NO: 179.

36. The pharmaceutical composition of any one of claims 33 to 35, wherein the vector comprises a nucleotide sequence encoding a miRNA, optionally, wherein the miRNA comprises the sequence of SEQ ID NO: 179.

37. The pharmaceutical composition of claim 36, wherein the nucleotide sequence comprises of SEQ ID NO: 181.

38. The pharmaceutical composition of any one of claims 33 to 37, wherein the antisense molecule is an antisense nucleic acid analog comprising the base sequence of SEQ ID NO: 179.

39. The pharmaceutical composition of any one of claims 33 to 38, wherein the cell or extracellular vesicle is obtained from a subject.

40. A kit comprising (i) an antisense molecule, (ii) a vector encoding the antisense molecule, (iii) a cell comprising the vector or antisense molecule, (iv) a extracellular vesicle comprising the antisense molecule, or (v) a combination thereof, wherein the antisense molecule binds to a portion of an IRES of a CACNA1A gene comprising the sequence of SEQ ID NO: 180, (ii) and a device for administration to a subject, optionally, wherein the antisense molecule binds to Argonaute 4 (Ago4), optionally, wherein the vector is a recombinant expression vector of any one of claims 18 to 28, wherein the cell is a cell of claim 30, or the extracellular vesicle is an extracellular vesicle of claim 29.

41. The kit of claim 40, wherein the antisense molecule is an microRNA (miRNA), a pri-miRNA, or a pre-miRNA.

42. The kit of claim 40 or 41, wherein the antisense molecule comprises the sequence of SEQ ID NO: 179.

43. The kit of any one of claims 40 to 42, wherein the vector comprises a nucleotide sequence encoding a miRNA, optionally, wherein the miRNA comprises the sequence of SEQ ID NO: 179.

44. The kit of claim 43, wherein the nucleotide sequence comprises of SEQ ID NO: 181.

45. The kit of any one of claims 40 to 44, wherein the antisense molecule is an antisense nucleic acid analog comprising the base sequence of SEQ ID NO: 179.

46. The kit of any one of claims 40 to 45, wherein the cell or extracellular vesicle is obtained from a subject.

The application's sequence listing, which the Patent Office published only in electronic form, follows.

SEQUENCE LISTING (226 sequences)

SEQ ID NO: 1 - DNA, 300019 bp, Homo sapiens
  ref <308>: DATABASE ACCESSION NUMBER: NCBI / NG_011569.1
  ref <309>: DATABASE ENTRY DATE: 2013-05-06
  ref <313>: RELEVANT RESIDUES IN SEQ ID NO: (1)..(300019)
gatgtcccgagctgctatccccggctcggcccgggcagccgccttctgagcccccgacccgaggcgccgagccgccgccgcccgatgggctgggccgtggagcgtctccgcagtcgtagctccagccgccgcgctcccagccccggcagcctcagcatcagcggcggcggcggcggcggcggcgtcttccgcatcgttcgccgcagcgtaacccggagccctttgctctttgcagaatggcccgcttcggagacgagatgccggcccgctacgggggaggaggctccggggcagccgccggggtggtcgtgggcagcggaggcgggcgaggagccgggggcagccggcagggcgggcagcccggggcgcaaaggatgtacaagcagtcaatggcgcagagagcgcggaccatggcactctacaaccccatccccgtccgacagaactgcctcacggttaaccggtctctcttcctcttcagcgaagacaacgtggtgagaaaatacgccaaaaagatcaccgaatggccatatccttttgcccgaaccccagcagcagctgcgcctccccctcctccctccgcctcccctcttccaggctgggagagagacccgggggttgatgggaggtggggaggaggggggtcttccaggggctgggagagggggcaccgggaggagtgtgaaagaatctctccaccccgagctgggttgagctaccctggaggcttgggaatgggtttgtggggggctggggggtgggcagcggagagtggatccttcccaaggaccgactctagaatgagatctggggcctggggtcgtgcaggagccttggtgggggctttcgagccaagtccggagggtttggagttctacggagtgagcttggagcgggctcgggcctgggcgcttctggccagggcaggggaactatgggggccttggttgggttttcttggccgtcgctcactggagtccacgcaggggaagctggacagcctctccactactgctttccccaaggtggggggccgccgcacttttagggcagggcgcttgggggctcccagggctaagagcaagagggagtccatgtggccttcacactgagaagccagcactggccgaagtgagtaccccagggtgggccgctgttcctatctggagaggatagtgatgggctggggggcgcttatgtttccctcatgtgtgcaggtcccattgcctttaaccgctgattggggaacctcatcatctttgggggtgtcgagaaagagatcccacttgctttatctgggcccctggcctgggaagacctgatctggacactttcagtaagaaagacagggcaacagcaaatgaggtggtgggtccattttagagcaccatgtccagcttttcctaccccgagtagccgagagggaacaccaggagaatcagcacccatgtggacatcttaggtaggtaaatgccttttaaatttttttttttttaatcaaagatccagaggaaaaaggtgaagcccacattttcttctgtggagatgctatcaaaatgcagatcttctgtgtttctttaaatccctgcctgcttgaaataaaccttgaggagggcttaacatctatcgagatgtaggcaggcaagggtgggtaattagtcgggctttctagcagttatctaagcatgacccagattccaggaggggggacacaccctgctgcccaggctggctggccactgtgccatgcccagatgtgccgcttctccgcacagttccaaccagctgccctctgtgtaaaaatgaacgggctggatgggtccctggggctcagcgatgagtcccctatcccttttgtatgtggttttgcagttatagactaaacggggctgggccctgtgtggtctccgggggttgctgtttgaggagcatggcgggtggtagagggactcacttcaggggggttcaaaatcgagcctggcgcttggatcctgggtgctgggattgcaacagagggcactgaggttttggagtgtgtgagtggtctactttgagggtggggaaaattaagaagttcagcagaggtgcttttgaggggagcatacctctaactacgatgccatctccgttggtgcccaaagcaggtgccaggtctttgcttcctaagtttcagactcttaaagaggctggttcttaaggttagcaattcctcaccatcccaggcccattgaagtgctcaggggtggcttgattactctgcctatcaacagagtgaggagtgggagtgccttgcaggaggacagggtattcatgggtgcacacccagttagctccaggagtgagagggctttgctcggctgacaggtttcctcattgaaaatggctttagatcgccttctggagcctggatttggagacttctaagaggaaaggaaggaggtggggagcccttctgctgtgtccttagcttacctctgtccagcctgaatcctgcagattggagggctgttgggggagagggggattgcagtggcccctcggaagggggaatcgtgggagagggaggcaggtgaattgcgagtgttgcttgccacttcatctattctctggccagctcgcccggggctttcttgctcttatgatgagtttgtgcattatgctctctgcagactgtttttgttctctttgacccgaggtaacaaacacattatacagccctactctggaagggaaaactccccacctcacaatctgtcatcgagctgggtcatccaggactgagctttctctgtcctggatggagcggagggcggtggcggggtgggtgggagggttggagatgagaggggatggacagagacctggggagggaggtagtgaataaaagaattcaggccagtgtaaagagaaagacacgtggaatgtcagagtcacgataccagggcagaacattctactttttaatctaaatatttctgccattaaaaaaaaatgtttcagcatatcctgagagtgaaaaaaaaagtgtgtaggtacttaaataaagtctaatatatgtacaggcaagtacatatattcagatgcatagatttttacaaaatgaacacacccacgtatccagcacccaggtcccgatcagtgccctggaagtccccctccccataccgcctcctagttgctcccccaacaagggtaccgctcacctgacttctaaggttcattttgcctcttttaaacatgtaaatggagtcacacagtacgttcttttgccactggcttcttttgctcacatctgtgtatgtgactctactacaatctatccattctactgttgatgggcatttgtgtcatttctgtttgtgccactgggaacattcttgtgtcttctattatttttttcccacagttctcttagataggagtggaatcgcccctgctactttttgatgcatgtgttgtgggatgtgtatttggaaatggtgttgactaagggttgcaggtcgatatggaaagcaggttcctccctgtcttgtttaagagaagtgagtgaatgatccatgaacttgtcggtatgctcacagggcctaagagtgctacttccaaatgtaaattctggcatggtacactggtgaaggatgcagtcttgctttctccacactcggggcaatttgtcactatgatttcttcctctttcatccctcagtgggtcaaacttgaagccatcaatgacaattaagaatcctcatttatttcattttttcccctcttcctaagtgaggaaacccaaatggaagtctttgatgttcaaatttacattgccgtgtttttctcatgccaggcagcaagccgtcttgaccacacaccttggtttcatgttttcattgactggaattgtgattcaaatagggccatgagggtctctgatgattgccgaagagctcagatctgtcagctcaaaaaggagcatctgtcagccttcctagagttccctccccacttaatgccactcactccttctaccaagtgccaaggtgaatgtcatctttccagccctccctgtgccaccaggtctcccactgaacatgatgtagaaactcaggccatcggaggaacactggaagcaggtcagtgtattatcacgcacagttgcctgaattacacgtagaattccagcttttcatccggtttgcagaaatcttaacaagacacctaaagtcacattgacatcaggtgacatcactttgacatctgtggacattggctgattggcactcctctcatttttttttttttttttttttttaagaaaagctctctaaagagaaactttctgcatgagaagcgctgggagacatgggagcaggttatcagactcttggcctgtcctgagagatagaatgttctagaaggtactgccgtagagggcaggatggtgtcacttacgtgatccttgtactagaccggcttggctggtatttccagaggagcaaaattctgcgaagtaaaatttagcacggcttttccaatgggagtattttcaaaaagggtgcaatttcttatccacaattccccaatccaaaaagctccaaaaaccaaaagacgagctcatatagaggtaaaacctaacctgaactgacttcagtttgaagtcttaatttacagttttcattcattctacttggtgtgcatttgagtatgttttgcagcagaaatgttagatgtgcttgatgatgaggtgctgcttcagctcctgactgttaggtctgcattgtagtcctgtcaaactttcaggtgtatggaagttgtcttgttaacaggatggttctggtccagcaggatttgggtggggtctgggattctgcttttctagctagcttctagggattccccatgtggtaagttcatgggctagggttggagtatccaggttagatcatagagacatcttgttatcatttttcttttccttaaaaatcaggtttataggggccgggtctggtggttcacgcctataatcccagcactttgggaggctgaggccggtggatcatgaggtcaggagttcgagaccagcctggccaacatggtgaaaccccgtctctactaaaaatacaaaaattagccaggcgtggtattgtgcgtctataatcccagctactcgggaggctggcaggagaatcatttgaacctgggaggcagaggttgcagtgagccgagattgcaccactgtacttttttttgagactctgtctcaaaaaaaaaatagatttattgatgtataatttatttgtagcaaaattcacccttttgacatactggtctgcaagctttgacaaatggatgtagttgtggccaccacccaaatcaagatatgggacagtttcatcaaccctaaaatacccccacagtgcccctcttgagtcagcaccccacttctccagccccttcaaccactgatctgttctccatccctacagctttgccttttgccgaaggtcatataaatgtaatttcacagtatatagccttttgaatgtggattcttttactcagactttgagattcattcatgctgttgcctgtgacagtagcgccttcctttttggtgttgagcaggattccatgatatggatggaccagagtttgcttcccagccgaaggacattgggatgcttccagtttcaatgattatgaatagagctgctataaacattggcttatgggttttagtgggaacatttcatttcatacatttcatttctcttgggtaaattaacccaggagtgagattgctgagttgtgtggtaggtgtatgtttaattttataagaggctctcaaactgttttcctaagtggttgtaccattttacattcccatctttgcaatgcgtctaaaagccctgagttctgaattccaaagcacgtctggcctcgatggcttaggattaaggatgtggatctatggaaaggagtggaagtaatagtgttaaatcccggtcagagaaataagaaagattaaggatgtcattcaaagctatgtgcctgcactagagagagagaaagaaggggttctcttgggtggggttccacccctccctggtagttctaccattccccaggaaaaagtcaagctctgaggctgtgagacccatgatctttaccctgttcttcaccactgcaaccccagtgtgtgggacaaagcaggcgtcctataaacgtttgctgagcaaatgagaaaaggtacctgtcttcacccattaactaaattgtataacatctatctgatctacccttgtgccaacgttttaggattttgatgggttttagttgcagggggttgagagactgtccatgagattatcagaccaatgaaagtttctgaaatgttagtgcttgagtagattggatgcagcggccccttgagaatgaagtctttcttcagggacttggagtgggaggcatctgttgggtgcgtagggcttatgcttccccctccctgtttcccccccagtagcaagcacacatatacactttctcagcaataaaaagcaccgccgggaaggtggactccatccagaaatgatcagagcctaagagccgtgcagtaacgcatttccgagaatgccagctcagctcctgagaaaagggccggatgggatggtgcctgctctgaaagagggcagagaggagagggaaaacactccggactctgggtcagactggcccaggttcacattattcaccagccatgttatcttgggcaccagagcctatttcttgacatgcatgatgaggatattccttctagtagcatctcccttggagggctctcaggagattaaatggggtcgtgcgtgaaaaatggccagcacagtctccagcacagagaaaaaccccaaaacgccagagccgtaatactatggagtcatttaggttccagtgttctttttttggaaaccggccagaaaagaggctttctgggtgggaatgggagcgaagtgcccccccccaccaccccctgcgactggtcagtgtggattgattaacctgatcgtggcgctctttaaagccacctttggacattttgcattctccgttctctctggaagctttcaggggaaaaaaaattcgtggccacttgacccatttttctattcccttgagtctaaggtaaaaattaattctctttcctcctttggtccctccctctctctgtgggtgacaaggtgagggagttttaaagtatataattagcttccctcttccccttttgcactccctgtctcttcctttggggccggtcgagagtgcagcccaggatggccaccccaggtgtccactgcaaactccacagaaaaactttgctcaacttttggtttagaatttaggtacccccctccccttccaaactttggtcttctttctcctcactccctaaaaaaataggaaaaacaaggaacattcctggcgagggaaccatgagtgggcacagcaacttaggtttcaaaaaccactgggcctcagttcttatctgagtagggtgacccttcagccagggttgcctgggactatcctgggtttagcatctctggaaactcacagtcctgggcaaactgggacgctggtcaccctaatggtgagttcttaacacctgagagagaagaatggtgcaagagatggtgccgttgaccaagaaagggggagagtcagttacttattccctctgaaaagccaagactttttattggaatgaatgcagcttttagaagccgtctttaaggcagctaatacaagagagattccagctatgaagggaaatgcctgagttaagtccggatcaagttttgacatctcgcttcggtcagacacggctttatctgccgttcagactgggagcagccgtgagtcttccttaaaggtgcctgttgctcaggcggcacctgcagttagaaattagcagcctcccacccccagcccccaaataacaggattcaagagtcccctctctgaagccatgagggaaacccaacttagtcacccacttgccagtaaataatattcatgctgttaagttctgttctcattttaggcctatgtgtaaaaaatatatgtaattttaaactgatttttaaagtattttcatacgaacagcatttgcaggagggcgaagtctggatgttacctttttgtaaaagtggatggatttgtcttcaatgagactctggggcagacttaaaacttggcccgcagtggtgttacatggattctgatcttccagagtctgtcacgttcttttatctccatgatctttattatcttctttattgagaatgatgggcatggtgtgtgtgggtgggagggctatgctgaccatcactgcagtgaaatgtgttcgtggcatgttgtggcgtctgcataggaatgtgtctgtttgattaacagcacaagcagtggaggctgtaaggaggaaaagaggagggaaggtgatattggatggaggggagacatatagagcttgggaacagtccaccctggctgcaaatctcagctccagctcacagttgtggagcctcagtcttctcctctgtaaaacggggacagtagtcctatgtccgaggaattgtaagaaggttaaaagatactgtacccagaaagcacatggcatatataatcatcctgtgaagtagccaactcaatgaattttattttatttattttgagtcagagtctcactctgtcacccaggctggagtgcagtggcatgatcatggctcactatagcctcgacctcctaggctcaagcgatcctcctgccttagcctcccgagaagctgggactataggcatgcaccaccgtacccagctttaacaacataaatttatatatatatatatatatatatatatatatatatatatatatatatatatatatatattttttttttttttttttttttttttttttttttgagatggagtttcattcttgttgcccaggctggagtgcaatggcgcgatctcggctcactgcaacctccgcctcccgggttcaagcaggacgatgggcatttgggatgtttctagtttggggtgggggattgtttgtttgtttgctgttatgaacaatgctgctgtaaggaatcaataattttgaatgaatgaattcgaggtgttaattttagtctgtgtacttggaaatctagcttcacctagaatcagctgagattcatcagcatttatggcaggagctaagacatttcacagcttactcatcattttctctaagaggctgggtcaaccggttagctcttggtcctgcttgtattctgagagtcagaacctgtggtttagacactggcaattgatatggttgtagagaagcagcatggttgagttgagagcatggattctggagctaggtggctggggttcaaatcccagctctactagtcactggctgcgtgatcttgggcaagtcacttaagtgttctgtgcttcagtttcccagtctgtcccagtggtgattctaatagctccatggggatcctaatagctcctatctgggaggattaaatgagttaatacatctgatgtttagagtggtgcctgacacttaggaagcactatatgtgtttatacatggaagagtggatagatggatggacttatgtgggtggccatatttgggcttctctgatccactgctgagaatagtgtgtggcacacagtaggtgctgcataagtgttaatattctgctctttcttgccaagtctctcaactcccttgatctctgttatttttggcgtctgtgttgttaacccattcttctgaatgatcagctgaatcactgttgctccaatatataagccaaggagaacacaatcacaaggtctcattgattgtccatactagaattccatgattcctaggcccaagtaggattttccccacgtctcagcaatccttcttccatgtttctaatctttttctctcatttgttatgccccattgccagactctccaatctccccacagcttccccttcctctaactatactgtctctagtcttaccttctccctaagggcaccgtctttgaagacatcaaatacttcagagcaccaaatataggttagcttctctgagggccttacaaggacatggagtgtttgggtcttacacaaattggaatggtcagaaatgtttagagacttgagttgtctttgaaagagttgtcagaatgcaaatttttgacttgtggcctgtttctgatcacaacgcagtcttttaagttatggatcatagctggatgtttgtggtttagaggggatggaggcatcctctgcagttagtgttggatgtctgggtggatggatggatggatggatggatggatggatggatggatggatggttgaacagatgcatggatgagtggatggatggatggatgggatgaaggaaggaaggaaggatgggtgattggagggtaggtgggtggataagtagattggtagatgactcgatgggtgggtggacaaatggatgggtgaatggatgactggatggatgactggatggattggtgtatgagtgaatatatggctggatgaataaataggcagatgactagactggattgaggggtaaaaatatggatgactggatgggtggatgagtggatgatagatggttgaatgggtgggtggatgggtggatgttggatataagggtgtatggtagggtagctgtctatgtgtgggtctccctgatatttggtgttctgtttgacttgggaatgaccaagtctctccgcttaccaccttatttgtaccttttccagtatcaagtgaattttgcacacttttgtaaaaatcaataagattgtatgtttaggactttgggaggccgaggcaggcagatcacaaggtcaggagatagagaccatcctggctaacagggtgaagccccatctctactaaaaatacaaaaaattagccaggcgtggtggcgggcacctgtagtcccagctacctgggaggctgaggcaggagaatggcatgaacccgggaggtggagcttgcagtgagccaagatcatgccactgcactccagcttgggcgacagaacgagactccatctcaaaataaataaataaataaatattatatgcttaggttttacctatgtaattagaaagctccttgagggtaggggacagtgatttgccttcctcacatccccccaaagttcctgcactatatcatgcataagtatttaattgagtaatggtgaggaaagtaaacagtgttattgaacaaagattattaaaattctggaaacacctggttttgtttcagcactgggactgaaagtggaattccttggattttgctccattggtggataggatagcatgtggtggtggactggtagactctttctcttccaagcagattgggtaaatgccccagattcttacccactagtcagagattacagattactgattgatatggtttttctctgtgtccccacccaaatctcatctcaaattgtaatacccacatgtcatgggagggacctggtgaaggtgactggatcatgggggtgatttcccccatgctgttcttgtgatagtgagttctcatgagatctgatggttttaaacttgtgtgggcctctttcctctctctcctctcctgctgccatgtaagacgtgccttgctttccctttgccttctgccatgatttgtaagtttcctgaggcgtccccagccatgcagaactgtgagtcaattgaacctcttttctttataaattacttttatagcagtgtgaaaacggactaacacactgatgtagcaaggtcctttaaggccccatgtgatctggtccctgttttgtctttgatctcatctctttcattgtctaccttcctttcattgtctattctgtctcagccctgctgaccattttactcacacccatgtcatttgcattacatgacattccttctgttcagcataagctatttcctctgcctgcatcactgtttctccaggtctccccatggctaactccttctcttcatttaggtctcagcccaaaagttacctcctccaagaggcctatccttttcatttactgaacatctcatgtacaaaaaagaatataaaatatatgtatactctctcatccacaaaaaaatctctgaagacattttaatgtatttcatcccatacctttttatgcatgtaaacttttaggaacacatttccatgccactaggtatccttgaaaaaataagggccaccatgtatagttgcacaggttgtgcactgcacaaagatagcatgtcacatatcttaagtatcatggagcttgtatgtctactatttcagtaccccagctgataaaagcttaagtatcttgttctagcaagatgaagctattatgacaatttttgacagagaaaggggtgttttgtttaagttcacaatcagagaaatgggtgtcttgtttaatttcacaaccagagaaaggggtgtcttgtttaaattcatacagtggtgctgtatgggttggtggcaaccccagaaaagactgttgttaatatctgataatgttccactttatacgtgtattatattcatgtaacaatctctggctgtttgttttgccattataaataacagtgcagtaaacatctttgtgtgtgaatctctgtccaaggttctgatagttttctgaatgaaattcctgtctatatatggcactccaagcccataattgaaactctgctgttaccactttctttgaatctgtagaaggaattttgagaacaggtgactggtatattcaggatgttgatgacaaggaacagagaaagaacagttaaatggtttggaatttttcctgggctgcatgtaaagcagtgcttttgaactgggagcaatttttcccccaaggggacttttggcaatgtctggagacgtttttggttgtcacgaatgtagggggagggggcaagatgctactggcatctggctggtagaaaccagggatgcagttcagcatcttaaaatgcacaggacagcctttctcagtaaagaattatccagctccaaatgtcagtaataccaaggttgagaaatcttgatgtaatcgatgtcatgggtttcttcaagaggagtgggtggatttagggtttttgggtgacttaaatttaatttacagtttgtcttcctagctgggtgtctaagccagctttctgtgaactttagatcccacacaagaagcaacaggcttgctaccgacagattcgttgatgtaaatatagatgagtgtatagaaggaaatctcacccagagctggaaaatgttggaatgaaaactgcggcggcctccccttctctctccttccccttctgttgccctgtttgaaaatcgtgccttactttctttggtctcctggcatggtgaatgctgctggtatggactgtgtttctatatccccttgatccccacacccttaggaacgtacaggagagagaccctggagcatatcagcttagagatggaggggaatgggaaggagtgcgttcattcattcataaatgttgactgagcacctactgtatgctaggtgaatgggaggacgtgagggcagggaggtgacaaggttggcttattctgggctttgtgaactatggtgaggattttgtttttttccaaaggaaatggaataaccactccttttttccccccgatatacctaaactttttgattttcataacaaaaatgggcttccttttgtatatttgttttgagaccagccgtttttccaccaacactgatcacactgcagtgagcatcctggtagagaagtctttgcacacttctgtcactgtttccctaggacagattcctggaaatggtatggcaaggttgtatgtcaggcttttgggccaggttgcaagaaacaggaagtctgtgccctttcaaattccaaggtcccctttccctgacgacgtggcccaatcaggcttgccctcccttgattttacatcttcaccaatcagataagtgaaagtgaaatcctgttgtggtatcctgtgcatttctttggtgacttaagacatagagcattttccagatctctgtgggctgtttggatatcctttcctctgttttctcaggcacattctttaccgatgtctttgagggattgagcaagtttctgttgaaattgaggcatgtcatggctctgtgtggggcttgaggcagtccagtgtagtggagggagggaggctgtggagcctggctgcctaggttcaaataccaactctgcttatttccattcatatcattttaggcaaatcacttagccccctgggcctgcctttcctcatcagtaaaagtggtataacattagtgcctgcattgtggggtggttgtgaggaaagcagcactcaaaacagtacctgacacacagtgggtgccaaataagagtctgatgtattagtgttataggtatcggcctcctccctccccagtgcaatagtgtgtgtgcgcctctgtgtacctctgttggtgctgacaagccctttttaaaatttagaggtgaggtctcactctgtcccctaggctggagcacagtggtgcaatcatggctcactgcagcctcaaccgcctgggctcaagcaatcctcccagcttagcctcctgagtagttgggactatcggtgtgcaccaccacacctggcccttagacagcccctttatttcaaagcgaaatggcagccacaagatttagtgcaagctctccaagctttaggaccagctgcaactcctctaactgaccaaacaggatcccccatgtccccaacccccaaaacctgatgaaaagcaaacagaccattttccacattcatgacggaaaggcccttttcttggctcctgcccttgctcatgtcaggatttcactccatccctgataaagaggaagcaccatgtcccaggaggacatggaaactctctgctttgtggtgaatagttacagtaacagtagctcctctctgtggggagcttatgagcccctaagctttatagaactgccctggcagtttatgagaacttcatcccagcccccagagctcatggcacttatttttgcccccagtttgcagatgtgcacactgagactcagagagctaacactgcttgccaaggtcacacatctagcaaatggagaaactttatgagacaggtgaaggcacagcaaggataaaaacccagagggaaaaatactcaagttttctccgggaaaccatttgcattccagagaggttggtgtgcgagtgggcaagagatgtcgcgggacgatggttaagggacagagtctgagctcaactaggactaggtttcttcctttccttccttccttcctttcttccttccttcttcctttcctttgtctttctctccctcccttccttcttcctttccttcctttcctttctctttccctccctccctcccttccttcttccttccttactcctttccttccttcctcctttccttcctttcctttctctttccctccttccctccctcccttcttccttcctttctttccttccttcctttttcctttctctttcctttctttcctttccttccttcctctcttcttccttcttttctttctttcttttctctttctttctttctttctttctttctttctttctttctttcctttctttctctctctctctctttctttccttctttctccttccttccttccttcttttcttttcttttcctttcttttcttttgttttttgagatggagtctcgctctgttgcccaggctggagtgcaatggcacaatctcagctcactgcaacctctgcctcccggttcaagcaattttcctgccttggcctcccaagtggctgggactacaggcacgcgccaccacacccagctaatttttgcatttttagtagagatggagtttcaccatgttggccaagctggtctcgacctcttgacctcgtgatcctcctgcctcagcctcccaaagtgctggcattacaggcgtgagctaccacgcctgggctaggactaggtttctatcggtggtgtggcttttgggaagctacctaatcttaaccactctgtttcgtcatctataagataagcagtgtagcattttcttgcaggaatgttgcaaggattaagtggatggtgactgtaaaacatcatgcgtggcacatagtaaattctcagcaggtagtcattgctggtcatttacttttctctaatgaccagcaagctcttaatttcctccttggcatgggcactgggacgtagatggacaaaacacagagagaaataaacacacggacaaaaatccccgccctggtgtggctgatattctgggtggggagagagagggagtccaaggaccagataaacaggtaaaggatagtttgagtgtggtaagtactaaggctcaaaaataaagatctcccaggtgatcttagctgcatttggaggtgacaggagatacaactgagaaactgagataggaggaaacccaaggggagatgtgggcttgatttagggtgatctgaggagtaggagaagtcaggggctggtgtggggaggctctgatggttctctctggggagtgaagcagggattcgttggggagacccaaggggacaggtgaaggcccctgaacaggtggccagtgctgagaaaggaaaggtggaggacccaagtgagttcctaatttcttcattgctcccctaaggtgtttgtctcacccttggccatagtcttggatcacttacagatgcagaccaggctgggctcaatggcttgtgcctgtaatcccagcactttgagaggctgaacccaggagtttgagagcaggctgggcaacatggtgaaaccccgtctctacaaaaaaatacaaaaattggccgagggtgttggcacatgcctgtagtcccagctacttgggaggctgaggtaggaggatctcttgagcccgggagacctatgctgccaaataaggtaggcagtagccacacatggctattgcaattttagaaattaattacaggccacatgtggtggctcacacctgtaatcccaacactttgggaggccgaggcgggcagatcatgaggtcaggagatcgagatcatcctggccaacatggtgaaaccccatctctactaaaaatacaaaaattagctgggcatggtggtgcacacccgcagtcccagctactcgggagactgaggcaggagaattgcttgaacccaggaggcagaggctgcagtgagctgagattgcaccactgcactccagcctgggcaacagagagagactccgtctcaaaaaaaaaaaaaaaaaaaaaaaaaagaaaagaaaagaaattaattacaataaaaacagtccctgagtttcactggccacatttgaagtgcccgatgaccctgtgtggcttagtgaccactgtgctgaatagtgcagatctagagcatcctactggacatgttgccagggtccctgaaccaacagaattagcatctcctgggagcttgttggaaatgcagaatctcatcccctaccccagacctgctcaatcccaatctgctcttcagtgagattcctcaggtgatcttgactgcaccttctaatcacttggaagctttaaaaatgctgaggctgggcacggtggctcacgtgtgtaatcccagcactttaagaggccaaggcgggtggatcacctgaggtcagaagtttgagaccagcctggccaacatggtgaaactccatctctactaaaaattacaaaaattacccaggtgtggtggcacacacctgtagtcccagctacttgggaggctgaggcaggagaactgcttgaacctgggaggtggaggttgcagtaagctgagatggcactgctgcactccagcctgggtgacagagtgggactctgtctcaaaaaaaaaaaaaaaaaaaaaaaaaagaaaagaaaaaggaaaatgctgatgccccaagctccacccccacagatgctggagagatttgtccagggcttcccctggagtggggaatgtttgaaaactccccaagggtttctaaagttcagccagagttagcagaaagcccattaggtggctaagcaggtagactgaagttggagctgtgtgaccttgggcaagccacttaccctctctgaaccacaagctcccttctctctaaaactagagacctgctggcacctccctcccagggctgtgagaagtaaatgatgggatgattcaaagtgctgagtagggtcagatgcagtggctcacacctataatcctagcactttgggacgctgaaatgggaggattgcttgaagccaggagtttgagaccagcctgggcaacatttaaacattacccaggtgtagtggtgcatgcctgtagtcctagctgcttgggaggccgaggtggggggatcccttgagcccaggagttcaaggctgcagtgaacaatgatggtgccactgcactccagcctgggggacaagagtgagaccctatttctaaaaaagaaagaaacccaaaatgctgagcgagtgccttggattgatagtaagcagtgcctgtgtaataagcatgaattttaaaaaatgaggtcagcagccttagagctaatggttaatgggtttgggtgtgggatttttttttttttaatttttaaaacattgagataaaattcccataacataaaattgaccattaaccattttaaagtgtacagtttggtggcatttaatacactcagtgttgtgcaaccatcacctctctgtagttcaaagaccccaaaaaggagaccccgtactcactgagcgctcactccctgtctctccccgctcccccagcccctggcaactactaatcttctgtctgtatagattgacctattctgattttgggggtttttgaactcgccttccctggctgacaacctctcgccatccaggtgagactgtgtgaaagcccagctccctgcatttctgggtcttcctctccccactgggggctgcccccacctgtttccccctctgggcaccctggttctactcatcagcctggcttaatcccagcagcaggtccatgttctgctctcctgtggctgccacaaatgagaggtttcatctcagctgggtttctcctagttaaatatttaataaataagacctacaacttgtgatgctgggagtgtttgatagtgaaattaatgatggggagagagtggcaggcggcccacaggtccatgctggagctgggatgaggcgccctgggcaggcgtccgtgccactgatgcttgggaaccacggtgggccatgccatcccatttcccccagccagggcctcttttttagcactgtgtccagcacagggtagccacctgataaataagtgttaaaagaaagagaggctgcgtgtgtagggaagaaggaagagacagaggagacaaagaggagacacagagagagagagagagatgagagagaaagaaaagtggaaggtgagaaagagacagagatggaaggggagagaaggacctggatggaggaagtgcaaggaaggcaatggtgagggaaaagagagagagacaaagatggaagggatgaaggagagggagagatatggaggtagagaaagagagacagaaagaagagagagaatattgcttcttgtatcttccccttctcctgttatccttgaccatcttattatttttttcttttttctgtctctccagttctcatttccttaccctcgccgtcttgccaactcgtcatctcttttcatttcctgtgtctatgttatcttttaattttctgtctgggtattttccccttttctctttctcagcataaactgttggttggtgtatgtgtcttctttcttttttagtctttaactgacgtgtgtgtgtatgtgtgtgtgtgagagagagagagacagacagacagagagagagagagagagacagaacaaacctagagagcagtgtaggaacatagatgaacattttaaagaccaaaccatgaagcgtacacccattttacccaggtcaagagccacagggccaccatcagattctccctcatgctcatcctcaatcacagccactccttccctcctggaggaaccactattggagattgtatgggaaccattcgcttgctttcttgtgtggttgtaccacctaagtacgcatcctgaagcaatatagtcagatattatgtggttttgagttttatatgaataaaatcatgtgagaggagttgttttgtattttgcttcattggtttgcagttacctttgtgagatttcatcctcattgtggtcactgcagctccttcatgatcttgtttattcattgatgatgagcatgtgactttgttctcttttgggcactggcataagcagctttgttggttgtttatggattctgctgctcgcttgcaggggtctctctggagcacatcgctctgtgtgaaattgttggatactaagatttgtacattttcaccttgactaaacactgccaaacaattttccaaagtgcttgtgctaatttacactcctgccggtggtgggtgagcattcaagatgcttcacaaccttgccaacacttggtattgtcaggtttttaagttatagcctttctcatggtgatttctcattgtgattttagtttgcatcccccgattgcaaattagagtgaacatagtttaaaatatttattgactattcaagcttgcttttttgtgaagtgcctctacatgctctgtccatttttgattaggtcacttttaaaaaaaaaatattgatttgtgggtgatccttacatagcctggaaactgattcttcatcattatatgttgtgcaatattttctcttggcttggcttttgatcttttttataatgtcttttgatcaccaacagttcttaattttgatgtggttgattttagaaatcttttcctttatagtttgtgggctttgtatcttatttaagaaaatcatttctaccctgaggccatggatatattttatgttatttctgaaagttttacagttgtgttcactgtatgtctttaatcagcttgggattgatttttatatgtggtggtaggtaggggtccaatttcctttttattccataagaattgtcccagcatcatttattaaaaagcccattcttgccccaatgatctgcaagacaacctcttgactgtttaacttttaccttctttcatctggtctgtttttatactcaacctttgaagccacaaatatttattgagtgccaactgtgtgccaggcactgagttacagtgacggatatgacagatgcaatcatggctttcatggagtttacagtctggcaaggatgacatgtaaatagttattactacttataatttaaaatgttataggccttgcaaaaagggacaagtctggcttgctctaaaagaaacatgtgaaacaacatcttccagggaagtgctgataaactgagtctttagtgggcctctgctattgtaggggtgggaatggtggaaaagatgttttggccacagggaacagcatgtgcaaaggtcctgtggaaggtgcttaggagtttgatatttatcctaaaggcactgtcaggctactgaagcagtaatacaatgattttatgtctgtgaatagttccactggttgctgcatggagaatgtattggaatacagcaagaataaaaagccatgagaccaattaggaaatgatttcactcattcagggaagtgtgccttgggctggcatggtggctgtggagatggaaatcattgatcagattaaaagaaattttgagctggcatgatttttcccctctctcccctctctctatctctgtttcttttctggttgtgttttctgggtgagaaaagcagtttgtgatcctgccaagggtatgtgctctggaggatgtatttgccacagatggtctttggaattctggccaagagagtcactggacagcccctggcccccagggtttctggagccaattcaacaatgactgtttattaacaacagcaaggatgagttgctagcctttccttcagagcaccttttaactgttaccttactttgttacccaaaccgacactatggaattggtgggggagaagtggaagggtttttatctccattttttatagaacgggggaagttaattggcactcttgaaatcatacaaaagatgttggtttcaggattggtttctggactttcagcccaatcccaattactcaagctcacacacccaatccccaaacatactcttttgcaaataatttccctactgaggtgctcctggccaatttaaaaggtccccatttccttgcctataaaatgggaattaaagtaaaaatatctacctgttgacttgctgtgaggtcagtgggcctgacacatggtgtggactcattatatttacctatgtgaatcccttagttccctttacttggaagaggtggaaaactcaaaggggcttaaacaagaagtggggattgtattggctcatgagactgaagagtctcaggagtgtccagcttcaggcttgtttggatctagggatcagataacaccattaggcctctgtttctgtttcttggctctactttttgcagctggctccattatccatgacttagctgcacttccagccctccagtctgcccaagaccatattcagagagagattcttctctctttttcagctatcttcccggaattttcagcaaatgctttcttgcttttgattggctgttgctgaggtcgtgtgctcatgccagaaccaatcactgtggggaaatgggaggtggagaacggggtgctctgattggcttaggcttgggtcacatgactttatggagttggggtggagccaacttctccaagtggggaagagcagtcttcttaaaggtgtattaggatatgcttgctgctgtaacaagcaacccccaagtctgcagtagcttaaggcaatacgaatgtacttctcactcaccctaaatccaatcagataatcagcaagtggcattccatgtggtgatttcaggacccggctctttccatctgtggctccaccatcccctaagatcagaaagtccttcacttccggcctgtaggaaaagagtatgaaggctcacacaggaagttttgggaggccacatatagaagtagtgaaccttacttctgcctgcattctgtggactggaatttcatcccatggtgtatgagagagggtcccagtaggaaacggaagacacagaccaagaatcaaattaagagatagcttaagaatcaaattaagagatagcttacaaaggtgtgggcccttactgaaatagagaaggaggaagagaggaaggaggcagagacagagagagactgagactcacaaagacacacacacacacacacacacacacacacacacacacacacacacaagttgagagaaagaaggggggagagaaagagagagagggagcatttcctaacaggaagctggcagaataaatgtcccccattgtccaaagccagagggctgggagcccagtgagcccatccacacaggtcagccccccatgtgacagtcctagaagggtaaagaaggaaggagagtggatttggggtaatggaagacagccaatacccatggtccatctgactgcagggggaactgagaaattcagtccatggagaagaaggtttagtggacacgtcactttgtctttttcacaaagtgaaactaggttctcaggtggaaaaaagaaaaagaaggtttgccttgctgctattctttttttttttttgagacggagtctcactctgtcacccaagcgggagtgcagtggcacgatctcggctcactggaagctctgcctcctgggttcacgccattctcctgcctcagcctcccgagtagctgggactacaggcacccaccaccacgcccggctagtttttttgtattttagtagagacggggtttcactgctagccaggatggtctcgatctcctgacctcgtgatccgcccgcctcagcctcccaaaatgctgggattacagacgtgagccaccgcacccggcctccttactgctattcttattattggtggtagcagtggtggtgatggttattggttcttagttccctctacatgccagtatctgctctcttctttttttctcccttacttctttccttgttctgcaaattctttccctttaagtgaaaatctttccgtgttctccaagggagataaattctatgccaagcttgagtgtggggtcctctgcttggatagctgtcttctccaggagatgaggtagaactgagatagtgggggtctctgcaggcagtctgtgcccctggcaagcccctcaccttaacctgaggctgggtggggaaagatgccttgatggagtcagaacagaaagcaagtgatcgctgcctgaaccaagcagtcactttcctggaggtgaaacctagaaacggtccctcaggctgggtccagggaggtggacttgggtcccaggggcaggaagcaacctgcccctcacctgctcctacctctttgtagcctatcttggcaaccagaagtaggtatacaagtgacgttgaagctgggcatgttaacaatggtgtgagcccgcctgactccaatctggtccagctgtactggccgtgcatcctcatctccagcccccagggtcagcccagcggctgtaacaatggtctgtcccctccccgccccacccacttctttgaactcctccaaggatctgtgatgatagggctgtcactgtcttagcttccaccattcaagcttaaccggccttcttcccctccatggagaacggaagagcaacccctcattgcctctggcagctgaccagcaggtccctgccttctgcccactcccaggtctaggacaatgaggtgagaggtagacaggaccaagttccccagtgctgtcttctaggtccacctatcatgagagccgtgattcctagtttttatcaccctctccccaactttgccagctctccacttctggcagtggtggctgcccatgacttcaccttcccgtgcctcagtttcctcatctgtaaaataaggacagccatggtaatgagagttctggtcaatatgccaggcacctcgcttgcatcaatttagctcatcctttcagtgccctgaggggtgggtactgttatcatcccgtgtaacaaaaagagaaaaccgaaacagagagagagactcactatctgaggtcttgcacccctcaagcaacaaaagtgggatttcagcctaggctatctagattcggagtccacggtctcaatgaataataacaacaataataatattgtcctaatctgatgagtttttgatcagattcaatacaagagcataggcagaaaagcttagcccagtgcccagcacatggtaagaactcagcatgttatttataatagtaataaaccattttatgttatgtaattatatattcatagataaatatagttgactcttgaacaacataggggttggggcaatgacctcctgtgcagtcaaaaatgtgtgtgtaactttttttctctattttttagaaattttaaaattagagacaaggtctcgcttttgttgctcaggttgatctcgaactcctgggctcaagtgatcctcctgcctcagcctctcaaagtgctaggattacaggtgtgagcccccgcacccagcctgtgtataacttctgactcccccaaagcttaactactaacagtctattcttgaccagaagccttaccagtaacataaacagtcgatgaagacagattttatatgttatatgcattatatactgtattcttacaataaagtaagctagggaggagaaagtattattttaagaaaatcataaggaagagaaaatatatttactattcattaattggaaagggatcattataaaggtcttcatcctcattgtcttcacattaagtaggctgaagaagaggaggagttggtcttgttgtctcaggggtggcagaggtggaggtggaaggggaggccagaaagacaagcacgcttggtgtaactgttattggaaacaaatctacataagtggacccataaaattcaaacctgagttgttcaggggtcaactatatatgctacaaatacgtaatatgctaatatagttgtatgttattgttatagtacggggatcagaaaatgttttctgcaaaggattagctagaaaatgtctagtaaatactgtctctttgggaccactctactctgccattatagcaaaggcagctacaggcaatacgtaaatgaatgggcatggccatttgccaataaaactttgtttacacaaacaagccatgggccagagtttgtcaacggctggtatagtatatgttattatatattagctttactttttctgttgctttgtttatgttcttctttgcccttcctttcttaaaggccagcctttctttctctctgttggtctgtcttttaggacagcatggcaggccactgggacatgggctctcctgactccaggcttgtttgtctgataagacatgaagagtgaaggtggcaggactctgagctcaggcctgtcctcctcctcttccctctcttcgttttttctttcctctttcctcttttcttcccaagctccagaagttgccattttcctttcccattgctgattttctctgccttgggagaaagcccgagaagatcacttggaaaagcccacgagcatctctggcctcactcacccagctcctgccattgtctttactcttcctcagacacaccaggcacagtcctacctcagggcctttgcactggctgtttcctctgtctgcattgttcttctctcaggtgacctcatggcttctccctcctctccttcaggacttcactcaaaggccaccttctcagcatttgcctcccgcccttctgccttattttcccctttggaacttttcaccttcttacttactcatctgtctgctatctgtcaccctacatcactatgatctccacaagggaaggtgattttattcgttttttgttctgttttgttgaagatgaggttttgctcttgttacccaggctggagtgtggtggcacgatctgggctcactgcaacctccacctcccggattcaagtgagtctcctgcctcagcctcctgagtagctgggattacaggcacccaccaccatgcctggctaatttttgtatttttagtacagatggggtttcaccatgttggccaggctgatctcaaactcctgacctcaggtgatccacccacctcagccttccaaagtgctgggattactgtgagccaccacacctgatcttttggttttacccaccaatgtggactagaacagcctagatcagcaggtggcatgcagtaagcagttgataaatatgtgttggatgagtgagcactgtggcttctgtcattctgttgctcaatagcattcatctggaaataaccacagtttgtttatccatttacctgttgattggcatttctgttgattctcgtttgggccattatgaacaaagctgctgtgaaatacttatacctttgcccaattcttcacttggtgaacccttataaatcctttaggccaggtgtggtagctcacgcttgtaaccccagcactttgggaagccgaggtaggaggatcgctggaggccaggagttcaaaaccagcctgggtaacatagcaagacccgtctctacaaaaaaataaaaaattggctggacgtggcaatgcatgcctgtagttccagctacttaggaggctgaggtgggaagagtgcctgagcccaggagttcaagaccgcagtgagtgatcgcgtcctgcactccaggctgggcgatagagtgagaccctgtctgtaaaaatgacagcaacaacaacaataataaaacctttaggtttcctcttaaaaggaacatccttagagcttttcctgacccagcaactcaccccaagtctgaattagacttcaccccatttctttcataacatttatcacaatgacatgtttattttgtgggggcgggtggcattctggccagaactgtcgacttccagagtgaaaatacggaagaaccaaataaaacacaacacacacatttgcacagcagctcgagggaggtgcttagttctttgagtttccaagaacagagagacgaagatttgtctggggaggaaaaatcagggactgcttcttggaggaggtggactgttgctgccccatccacccacacatttgcagatgtggtgatgagaagatgactgtcacgaggtctctgagcccagggggcccatggttgagtgcaaagatagtggggttgacaaataatcgtcgtataacaaaagaaaagccaccacagttgcataatggaaaggcggcttctatagaacattcagatcatagttgaaggcatgtcacactgtgttactcagaggccactgtcagagccaaaagtgagagtggatgagagtttgggcaggaaacaactgaaccagatacagcatcacctccatgagggctcagctttatctattttgtcttctgttgcatccccagcccttagaacactgcctggtccatctttgctgtgtgaataataataaggaacgatcgctgtgttgagtttgggctgtgaattcagacagtttgctgctgcatacctgattatgagtctcagttttcctcctccataaaatgggcaaaacagtccttgcctcatggggctgtgcatttgtttagcaaacactgaaggagtatacatggtggccaaggcactcttcaagacacaggaagcagacaaaagtccctgccctctgggagcttacatgctcatggggagagatgtatgataagaaacaaaaatagtaggtaagttgcatagtactttagaagattataagggtaatgggaagagaacagcagagaaagggctggggaggcagttgctgtattagatagagctttatcgaggcgatggcattggagccaagacttgaggaagctgtgaggatgtctagagaaagaaggaacagctggtgcaaaggccctgaggtaggggtatatgtgacatgtgtgacagtgaggaggcagatgtggctgaagccagtgagcaagagagagggaaggtgcaaggataaggacagagaggtgacgggacaggttttggagggccttatgggctgcggggaggactttggcttttgctctgagggagctgggagccacggagggcttttgagcagaggagggacgtgacctgactcagatattcataggctcctctggctgctgtgaaaagaacagactttgaaggttgggggcaggcagggcagaagctggggaattaggaaggaggtgacagtgttggtcctggcaggtaatagtgggggtggaaccaggttgttgtctgtggagataataatgagtggctggattctggttataatttttaagtttttttattgtgataaaatgaatttttttattgtgataaaatgaaatttaccactttgaggtgtgcaattccacagcacttactacagtcaccctgttatgcaacagtcacctctatttaatctcagaacatttcatcccccctaaaggaaaccctgcacccattagtagttacttccagtttctcccttcccccagcttctggaaactactaattctggatataagttgaaagttgaccagtaggatttctaggcagacaggtggtgagggctcaatgcattcatgcacagaaagtactcaggtggcatatcataggtgctcaaaactgaaatggtgatgatgagttggcaatgatggtgagtccttccagaatccctgctctagtgctaaactgacctacctggctgtgtagaattctcacctgctggccgggagggtggcagaaccaggatcccttcttacttccagtctggcttgggttagggataggggaggaatgatcagaagaaccaagctagcaccatctgttctggaacatcatccaactcttgtccagatttcccagaactgagcaggaaaatgtccagggaggaacagtgcagctgatggaagtcctggtaagccctggccccagcttcctgagctgctgttgcaccaactagcatttgttggaccttcagtctgagccaagatggcagcttcagaggaagaacaagaagtgtacaagtttctttcatggttgtgtccccgcctccttatatagcctcatataaacccctgcactatcccgttactgtttgcctctccctgaaaagagtgtaaaactcccccactttttccctacttttcacaatgtgttttggtttctaaagatgaaactcctttaattatgttctggttgtaattttctggctccttttatttctcccttacttgatgtattattttcccttgttccttctgccccctgcctccattgatgtttctcttcactgctatctagatttaattctcaactcctgccaagttcagggtgatagtgcaaaaagacatggaccatttagtcttgaattcaggtcccacttctgacaccttcaaagctgctttactttgggcaagtcatatgatcttcctgagggggtatcctttaccttgttcagctaacatttcttgtttttctctgggcacagagtagagtgtcattttccccacctccctgaagttaggtatggctgtgtgatttggtttcatcaatgaaatgtgaggggaagtgacgtgagtccttccggacagaagccttaagggtgagcatgggattcaccatgtttcctttttcctgcctccactgtcatggatgcacaaagatggaccctctctcaaagtaagtgctggagagaggatgacatagatcagtccccatcccacttcatagcatgagtagaaaaatagacctggggtgtgttcaaccactgagatctggggattgtttgttactgcagcaggacatagactaggctgactgtatacctcattatctgcattttggggctgatatctaatcacagtgtctccaggaagattatgttgatgtatgttttagggatggatattcatattttcctataagggctcaataggtttggaaatgtcacatgcatgtaaacttctgattaacaaatatttcttgctttccaatttcttcctatagtgcttctaattttcctgtttttcaatcttgaataaaatgtgagaagtgtttgacttctccttcgaggagattaatggtttctaaagcctggggcattgatttagtcattctcaacctccttgtttctatgacctttttttctccttctctggtcacttagtgtctgctaaggggtgaaggaatgtctgttttaactcattgcattttttttttttttgagacggagtctccctctgttgcccaggctggagtgcagtggtgtgatgttggctcactgcaacctctgcctcctgggttcaagtgattctcctgcctcagcatcccaagtagctgggactacaggtgtctgccaccactcccggctaatttttgtatttttagtagagacggggtttcaccatattggccaggctggtctcgaactcctgaccttgtgatccgcccgccttggcctcccaaagtgctgggattacaggcgtaagccaccacacctggcaaactctttgcatttttaactcttgacatcttcatcttctttttcccacctcccctttgcctgttcctcccctgctcaccccaccagggagtttataatcaggttctagaacctgcaatgtttttctgttgttgtcttccatcttccttgagtcttatgggaatcggccatagtcgcaaattaacaaatagctctgaagcgcctcaagcttggaggcatttccttttgctcacctaagcaagatcctggagctgttgcaaatatcctgccccctactgtaaatctgtcttcatggttgtaagagattcagtcggggtcagtgaagacccgagcaggagatcttggccgaggctccttgatgttctgtctgcgctgggtgttgtcatattgattaagctcctgggactgctgccagcagcctctaggattaaatcaatagagtttgcaaaagtaaaagcttcttttggagacacagaatatgtgggtttattttttaatgataaagcttcaaggagaatcttcatggatggcagaaccagtgatggaaaaggcgaggcagacccaaatatttggggaagtgcagtggggagcaagtgagggaggtttcattgggaggccggggctttccagaaaatctgtttaactggagttgctaatgcaacagctcagagttagaagtgaaggtggaagatgcaagaaggactgccgctgagatgtaaagagaaatgaaggagaggtggatccatttgctcattcaataaacattttgggaggcaggggggtgggggggagcctgccatgtgcctggaactgggatgtacatggtggggacatgacagtgggcaggacagatgtggttcctcctggccctcctggaacttgtaacaggaaaagaaggcataaaataaggaataggcaaatacagacataattactaattgtggtaagtgtttgggagaaaaccagcagggtcctgtgtttgtttcctagggctgccaggacaaattgccatgaactatatggcttaaaacaacataaatatattgtcacccagttctgaaggctggaagaccaaaatcaaggcatcagcagtgctgagctcccttggacggctctagagaagaatgcttccttgattcttccagtttctggtagttgttagcatacattggcttgattggcttgtggctgcatcactgcagtctctgcctctgtcttcacatggccttctccttcatgtcagtgtcttctcttcctcttctctctctctcttttttttttttttgtcagggcctcactctgtcaccctgtacaagagtacagcagtgcaattatagctcactgcaactgctgcttcccagcatcaaacaatcctcccacctcagcctcctgagcagctgggacttacaggcgtgcaccaccatactcagctaatttttaaatttttgatagagatgggatctcactatattgcccagactggtcttgaacttctgggctcaagtgatcctccctcctcagcctcccgaagtgctgggattacaggtgtgagccactgcacctggcctcttctgtctcttataaggatctttgtcgatggattttgagcccgtcagataatccaggacaatctcatcttgagatctctaatttaattatacttgcagaggccgttttactaaataaggtcatggccagaggctccagaggctaaagcatgggtatgattgcaccactgcactttaggctgggtgacagagcaaggccccatctctgaaaaataaaataaaataagtaacctactacaggccctttgcgtagaggataattagaagtacaggggtaccacgtaagtgaagacctgaaggttgttaagcacagagcagagtgtgaacagaatgagacagagggaggaagagaatcccaggcagagggaacagcatgtgcaaaggccctggggaaggaacaagttcatcatgttaaaaatgagccagtgtagctagagtctgatgagcaaagggactcacaggtgggaagacacccaagaagttggcagagacaggtcacacaagaccttctaggtcaagttccggaggtgaactttattctacatgcaatgagaagtcctcagagaagcttaagtgggatgggacagaactgctttactttaaatatatatacatatatacaaacatataatattacatatataaagcatatatatgtatacatatatacatatctatctacctgtctatatattttttagctgggcatggtggctcacacctgtgatcctagcactttgggaggctgaggtgggaggatcacttgagcccaggagttcaagaccagcctgggcaacatagggagaccccatcactacaaataaaaataaaaattaaaaattagctgggtgtgatagtgtgcacctgtagtcccagctacccgggaggctgaggtaggaggattgctggagccccaaaggttgaggctccagtaagccgtgattgtgcccctgcactctagcttgagcaacagagtgagatcctgtctcaataaaataatttttgtattgaggtgaaattcatgcaacataagttaaccattttaaaatgagcaattcagtggcattcagcgcattcacaatattgtacaacctccacctctttctagtgctgaaatattttcatcaccacccctccagaaaaccctgtatccatgaggcagttgctcctcatcctcccctcccggtatccccccaacccccaccactcctggtaactacaaatttgttttctgtttctatggatttacctatactggctctttcatataaatgaattcaggcactgtgtgacctttcgtgtctggcttctttcacttagcataatgccctggcttctctctggagaatgaaatggatagaccactttggagtctactgagattatagatatttctgtgggaagggacagtggcttgaccttgggtggtgctgaagaggcaatgctgagcaggaggattcaaagtctaatttcggaagtagaattggtggggtctgatgatacatcagctgtagggggaggaagatgtaggaactgggaaggtctcttagggtaaccttacctgattgagctccttactaggcagctggtggtacaattcataacaaaggttaatagagaaagagacatgggattagggagggaatggaagagtttgggccttggacactgtagtggtttgaatcctgtccaccaaaaattcagatgcatttggaacttcagaacctgagacctcatttgaaagtaggatctttgcagatgtcattgagtcagggattgagatgaggtcatcctggattacagtggactcgagattccatggtaagtgcttttatatgagaaggtacaggggagaaagtcatgtggcaatagaagcagagaatggagtgctgcagccacaagccaaaagacatgtagaggcaccaaaagcgggaagaggcaaggaaggatcctcccctagagcctttgaagggaaaccccctaatttcagaaccttgcctccaggatgacgagagaataaatttctgttgttttaagccacccaatctgtggcaatttgtcatgactgccctaggagactaatatagacactcctatgagatgctctaagaagacacagagtggtatagctattgctaagaccacacactgtagcagggaggaaatcaaatggagaaatgccccaactccccctcctctctgatctcttgctggtgcctcccgttggccaagccaacccagaaggcagaagatgtggtggagggcagcgttgcagggcttggatgatgcagtcacagaagtcagccctgcctctaccaggatgccaaacagggcaatgagtggatattttagggagaaagggcaacaagagaatggcaaaatacatcgaaatgcatgcaagctctagaaagaggatagagatagataaagggtgattacctaggattaagccccagggaagaccaacatttagagattggatagaaaaagaggagcaaaaagggaagattgagaagtagagaccaggaggataggaggaaaactagaacaacattaagaagggcatggtcaagtaatctgggcacagaaaaatggccctgggatttggcagcctgggggtctttggtgatcctctttggaagagttttggttgagtgatgggggctagaaaccagcctggggagggtaggagaagaatgtgcagtgaggaagtggcaggaacacgtgaaggcaactcttcatgaaggggagtagagaaattggttggtggctgaaggaaaattttcagtcaagggtggaggttttaatgatggaagaatattgatttctgtaaattgggtcattcccatccattataccaatatgcacgggtgtcttctctgatataggatgctgggattctcaaatgcccatttgagtttagcatcatgaatttaatgtcaccagcccagatagttgatctcattcaggaatgctccactgcccaggtatggggaaggcaactagttgagttcatgcagggatggattttttccaggagagaaacaggaggcaagaaagtgcgatataatcaacctatgtaaggttgacaaggcaggagagggtcctgagaaatggcggggtcagtgggttgcagggctcgatgggatggacgttggtttgcatttaagggagttagtgagctgggaggtggttaaagaggaggtggttcagccgggcgcggtggcccacacctgtaatcgcagcactttggggagccgaggcgggcggatcacaaggtcaggcgatcgagaccatcctggctaacacggtgaaaccctgtctctactaaaaatacaaaaaaaaaaaaaaaaattagccaggcgtggtggcgggcgcctgtagtcccagctactcaggagcctgaggcaggagaatggcgtgaacccgggaggcggagctgctgtactccagcctgggcgacagggcgagactccgtctcaaaaaaaaaaaaaaaaaaaaaaaaaaaagaggtggttcaagacaaggatgctggaaacaggtgttttggaggtggctggtgtagcttctgagcatgcatagctggagtggcttggaggagacattggttattgatgaagaggtagggacatcctccagtgatcaaggaagcaggggaccagcatggacaatggtctctccacagggaaattggaggtcatcaaatgttaacaggttccgtcggagtcttagctcccagcttctgttttcctgtggatctcaggatcttggctgctggtgctacctctgactttggacttcccattgagcccagcagcactgggagggaccttcatggcattggctggtttaaggaagacttccttggctttgctgactttcttgggggccttcttggctacacctgcttttgagggagccctcctcacctcacctgacttcttgggggcaccttttccaccttatctgagttgggaaggtctttctttgattctcttgctttcttggggcccttctcactggtttttctgggggccatgatggtggacatattccagagctgagctttccttttgttcttaggaactaatttgaggctgccagtggccccaccttggtcttagagttgatggtctgcagggaatttccaggttaaaggttttttatttgtttgtttaattttgagacagagtcttgctctgtcacccaggttggagtgcagcggcacgatcttggctcactgcagcctccgcctcctgggttcaaacagttttcctgcctcagcctcctaagtagctgggattacaagcacgcaccaccatgcccagctaacttttgtatttttagtggagacagggtttcaccatgttgaccaagctggtctcaaactcctgatctgaagtgatccggccaccttggcctcccaaagtgctgggattacaggtgtgagccactgcgcctgacctccaggtttaagtttaaaccatgaagtagatggactgtgtagagagagaccagggaaatggaggattttactgaccactgaacagggatgtcactattgccagagaggaaaaggattcccccttggtagagtgaacatataagggaaagtggttgaaaattgaatcaggagacagagacctcacaccactcagaggtccctagagaactttactgacctagaaaaaaagataaacagggagaaggtcttcagttcttgtttggaatctgacactgaagcatcctcactcctcactctcttcccgaccccgagagtctgaaattgattaatactttttgtttaaaacttggcttgttgttttgttttttctttctgttttcatcaagggatctttattttacttttgtgtatttgtgtgttttccatgagtcatgttaattcttccatgtttaaactttttggcccagaggaatttatacatttaaattatggatttaatttcagaaggtacatacacacacacacacacacactcactcatctcactttttaaaaactgtaaaatatagccctgtaaatatccagaaaatatctaatgtgggccgggtatggtggctcatgcctgtaatctcagcactttgggaggccgaggtgggtggatcacctgaggtcaggagttcgagactagcctggccaacgtggtgaaaccctatcctcactaaaaataaaaaaattagctgggcatggtggcaggtgcctgtaatcccagctactcgggaggatgagacaggagaatcacttgaacccaggaggcagaggctgcagtgagccgagatcaccccactgcgccccagcctgggcgacagactgagactctgtctcacaaaaaaaaaaaaagaaaagaaaaagtcagtgtgcatcccctctgacatccagcaacttcacatcttggaatttatgctgcaggaaaattatcacaagtgcacaaggatgtatggtgagatagttattattatcattttaaaagatagggtctcactgtgtcacccaggctggagtgcagtgaagtgatcacagctcactgcagccttgaccttctgggctcgagtgatcctcgtgcctcagcctccccagtagctgggattacaggtgtgagccaccatgcctggcatccccctttttttaaaaaaaggttttaattatgaaaagaatatgggcttgttgttttgtgtggttttttaaaagcttaaaaaatgtgtagtgtgtcatttagaaggtgaaaagcccttaccccatcccacctcccagagataacctctgctagcaatttcgtgtttgtctttcaaattttttcccacacacattctttgtactggctgcttcccctcctgggttactcttctcccagacagaaacagggctcattcccttgcctcctccagcttttattaaaacattaacttccctgtagctggatgcagtggctcacgcctgtaatcccagtgttttgggaggtggggaggcaggaggatagcttgagcccaggagtttgagactagcctgggcaacatagcgagacccatctctacaaataaataaataaataaataaataaataaataaataatggaaatttaaaagagagagggaaggactcttgaaaaccgtccatatcatgcttctctaaatggttgagggctcagaggaaaaaaaatcagcaatttcacatcacggaatttattctgcagaaaaattctcacaagtgcacaaggatgcgtggtcagatgatgatgatgatgattattattattattattgaagaaagtagcagcagcagcagcagtattttaaaagacagagtctcggatgggcatggtggctcacgcctgtaatcccagcactttgggaggttgaggtgggcagatcacttgaggtcaggagttcgagaccagtctggccaacatggtgaaaccccaactctactaaaaatgcaaaaattagccaggtatggtggtgggtgcctgcagtcccagctaccagggaggctgaggcacgagaatagcttgaacccaggaaatggaggctgcagtgagccaagatcgtgccactgcactccatgcactccagcctgggtgctgacccaggttaggtgcaagactccgtcttaaaaaaaaagaaaaggaaaaaaaaaaaaaaaggacagagcctcactgtgtcgcccagggtaaagtgcaatgagtaaaggcccatgatgggaaccctgaggagagagtcaaggggaaagaaaaaaaaaaaagcaaaaccaaaatggaatttaaaaaaaatcaggtgcaatttgcataacagaaaattaaccattttaaagtgaacggctctgtggcatttactgcactccaactgttatgtaactaccacctctgtctagctccagaacattttcaccacccctaaaggagaccttgtacccattaagcagtctctctccttctcccctccccaccaccttcctccagcctctggcaaccacccatctgcattctgtctctatggatttacctattctaggtagtcaacaggatgagatatcccaaaagtccatccatggatgaacagataaaccaagtgtgatatgccttcctcagatattagtctgccttaaaaaggaatgaaatactaatctttgctacaacatagatgaacctcaaaaatatgatgtggctggacacagtggcttacacctgtaatcccagaactttgggaggctgaggtgggcggatcgcttgagcccaggtgttcaagaccaccctgggtaacatagcaaaactccatctctacaaaacaatttacaaaaaactagccaggtgtggtgacatgtgcctgtagtcccagctattcaggagactgaggcgagaggatcgattgagcccaggaggccgaggctgcagtgagccatgatcataccactgcactccagcctaggcaacagagtgagaccctatctcaaaaaacaaaacaaaacaaaacaaaaaagttgatgctgagtgaaagaagccagacacaaaaggcaacatcgtgtttaattccatttacatgaaatgtccaatgaagattttttttggcaacatttattttgagtataatattcagtgagtggaccacacatatgcatgcactgcagtatgttcttggaaacatttcagatttgagaggtctgttcagctatgatgacggtaggtattgtcccttccctccctccttgaagaaaaggaactaaggctggacgcggtggctcatgcctgtaatcccagtactttgggaggctgaggtgggcagatcacttgaggtcaggagttcaagactagcctggccaacatggtgaaaccatgtctctactaaaaaatacaaaaaattagccaggtatggtgctgcacgcctgtagtcccagctactcgggaggctgaggcaggagaattgctcgcacccaggaggtggaggctgcagtcaaccgagattgcaccattgcactccagcctgggtggcagagcaagactctgtctcaaaaagaaaagagaagagaagagaaaagaaaagaaaccaaaagaaaaggaaagaaaagaaaaggaaccaagacctagaagggcaaaaataggaaaagttggccgggcgcagtggctcacgcctgtaatcccagcactttgggaggccaaggtgggcagatcacaaggtcaggagatcgagaccaccctggctaacacggtgaaaccccgtctctactaaaaatactaaaaattagccgggcgcggtggcaggcgcctgtaatcccagctactcgggaggctgaggcaggagaatggcgtgaacctgggaggcggagcttgcagtgagccgagatagcaccactgcagtctggcctgggcgaaagagcaagactcggtctctaaaaaaaaaaaaaaaaaaaaaattggaaaagttatttactattagcagcaattgtcataaagtaatgaacatttattgcatgattacaatgagataaattgtatcctgtttttataagcatattaagttttcttttttaaaaaaatgtatgtatttatttattttaagagatagggtcttgctctgttgcccagactggagtgccatggtatgatcatagctcaatgcagcctcaaattcccaggttcaagcaatcttcttgcctcagtctctcgagtagctaggactacaggcatgtgccaacatgcctggctagttttcttatttttaaatgtatttttgtagagacaggatcttgctgtgtcgcccaggctgtcctcaaactcctggcctcaagcgatcctctgccttggcctcccaaagggctgagatgataggcatctacctctgcatttggcccacattaaattttctagtcatcatgggaaccaaaataaacaatataaaacactcacattccttgagcacttactatatgcagggccctgtaatagattattgtgtgtatcagctcattccattctcacacaacctatgaggttgatgctattttctaccttttatatatgaggaaactgaggctcagagaaggaaactgccttgcccaaggtcaaggccacgtctgatccccaaatcctttcaactcctctgcactactattttttagtgcagatattgccagttttctaagcagaagcatgatttagcagccctgagtagacttctcatttcagaaccaaagtgttggacattgttggataatatgaaaaacaaatgacacacaaacctatttgatactgtttttaattttctcttcatttgattttcctgatgacatgattaatcttttttgcctctaccctgtatgtgaaatgtaggtctttgcagatgtctcagagagtgttaatagttgctgctggttttgttttctctccccggggattcccatccctgggtgcaagtgaaattaaacttgtgcctctttgccgctggccgtggtgctgaaaacatcccgggcagcgctagggttgcccttgttagcatgccatccctgctaagagtcttaggctgatcagcgagtggagagatcttttccaggcttcattttggttagaactgtgtgttgaagattttaaagcccatgtctgggaactggagactgtttggattgtttgaagttgaaatagtcatgaataattcctacttgagatgggcttatgagggcgtggactagcatgcaatggttggcctttactaaactgtggccattggttgggacttgggtgaggtgtaacccatttggtctaatccatatggttagggccccaagtgcacctgcattctatttttttttttttttaaataaaggcaaacccatctatcttctaaccaggatagctcctgagtggtctttggggaccaccagcttaaaagcatagactgtgggctgggcacagtggctcatacctgtaatcccagcactttgaaaggccaaggtgagaggatcgcttgagcccaggagttcaagaccagcctaggcaacatggtgagaccctcatctctacaaaaatgttaaaagttagccaggtgtgttggcatgcacctatagtcccagctactcaggaggctgaagtgggtggatcgcttgagcctgggaggtcaaggctacagtgagctgtgatcgtgccactgtatttcaccctgggcaacagagcaagaccctaactcaaacaaacaaacaaaaaaaggcatagactgtggagttgggcagacctgggtgtgagccccagctctgccagtacctcctatgtgaccttgaaaatttgtttaatctctctgagcctggattttcttgtgtggaaaatgaggcttaccacagaacccaccttgtagaaatgttgcaaggaattaactgaaacaaagtgcttaccacggtatctgcccaaagaagcagttggaaacaaggcagctgtaattatggtcgctgtgcttgttaatggccccataatagttgatcatattgcagagtgaaattggggtatgtgtttaatggaccaaggaatatgtcttaaacccatatatctagggttctggtaccctctactctttttcctggtgattgtgatgagcatggaacttacatgaaaatgaggtctgtttggcttcttcacacaagctcaatgacctggctaactgctacaagtatctgtttccttagaacccacccatcagcagtccccatagtggagacaaggtcacaaagagttgacaaacctgatttgatttccgcaccaaccacaggaggcttgaaatgagatgagggtgaagggcaccacagagggatgcaaggattacttggacactgcaaggtcttgctaagggatgggaaccatcagccacgcccactttgagaattttccttcatgttctgaatctgaagagcaaggtcctgttctcagatgcaagccctccttcttccctacgcagagtcaaacttggtcttttccagggtcacatacagcctctctctggggcctctgcaggtcctgatcaatttcattgtgtatagagctctgtgtctcctcacctgcctgcagggctgtctgctatcctgacttccgagagccatttcggaagccagcttttcctcccatcagggatgcttctcttctttcagcccccgccccgctttggcctcctaggatggctgatttttctggatcccgctgacacaggtgctttctctccgagccaatcagggagcagaaaggctcagctcagctaacagaggcattgctcaccgcagctgtgagttagaactcaggctttctaaatcgggaggatcaggcatgacttgaggttgggctgagaaagcctcgcctgccccccagctcgactacccagtgaaacctttggcttctgcctcgggcgaggcatctcttaccatgccaagaactcagcagcccatctttctttcatctgggcaccaagtacatcattgcatatttcagggggtttcattgtgtccttaacatgctcatggagacttggcttgagatgaagtcggggtttctaggcagcaggacccatgtccccttccttcatttcctccaccggtgatttttgttttgttttgttttgttttgttttgttttgttttgtttttgagacggagtctcgttctgttgtccaggctggagtgcagtggcgttatctcggctcactgcaaactctgcttcccgggttcaggtgattctcctgcctcagcctcccaagtagctgagattacaggcgtctgccactatgcccagctaatttttgtatttttagtagagacggggtttcaccatgttggccaggctggtctcgaactcctgacctctggtgatccacccgcctcggcctcccaaagtgctgggattacaggtgtgagccaccgcaccaggcccttccactggtgttttttgagcatctactatatagagaatgctctcctgggcacagaggatgaagcagtgaacaaagtagacaaaaaatccccacgtgcatagagtgtgcagtctcgtgggagagacagggaacaagataaagaaggaaaaaaatagcagatgcttgactggggacggggactaaagaaagaaaaaaataagcaggctaagggggttgatggatgtgacctttgagtaaaggcctaaaggaagtgagggagggagtcatgtggatgtctggggaaagactattccaggagaatgaacagcaggtacaaaggcccctgggtacaaatgtgcctggggagtttggggaataaaagggaggccggcgttgctgtagctgagtgactaagggagagaatagaggagatgaggggagggaggtaatgggagcaggtcatgcaccttgctggtgctggaaggactttgtttttgcttttgagtgagatgggatccatgggaaggctttgaatacttccacatgcattaggctgaaattttcttttctgcttttgtcgcattccaacattgcttttatttcatcaaaatcttcggtttcttctcaggctctttacccaagtgggagcagaaggctggtacccagggctgttcagttctccccctggggtcagaacgtggaggagaaagcttggaggagaaacaggaacccccacctctttctggatgactcaaaaccgcaattacctgagctcctcctcctatccctgaaatagaggcacttagcacttcctaaacttcccggtgcacacaaatcccctggcgatctttttaaatgcaggttctgactcagcaggtggatgcaaggtctaaggctgcattcctaaccggtgctggttctgggaccacactttgagtagcaagggtctgaggtcattgttgcagatgtccatctggggcatgtctgtggacacttgcgggggtgcgggtgagcagagggaggggggatgatgttggaaaagcagtgtgagtatctgtgtttgataagaagtaagaaaatgaagcaaggtgggagagtagaacctctttatttttgcctacgtgctaaggttttattgccatacccagagagccctgggtctgaaatccaggcaacactggccagttgaaaccctgatattgcagcccataaaagtgctgcatgctgcatggtggacttctgggactcttcctggaaccttcagtgccagagccggtccaaaggaagtcacatccctgccattgaggggcaggagaccagggaaccggaggagtgggatggcagaagcgcgtgtaaggaggctgagttggcagggagagaaagcgaagtcagcttcaaatcatagcgagaggagaccagggaagggcttggcgttgctgctctgtgtacaaatattgtctcttattttccaggctgcagggtgaggcagagtggagtatttgtgcaacacagcccagctttgttctctgggctcctaatgcctgtcagctcagaggcagaaagccaatcagagatgatcgtcggcaaggccggcttttgttggctccccaaattgccctgagtctcggattttgcttttcagagtgtgctttcagctggaggcaaaggctgaagctggtgacaaaaggaagcctggttttcctggctttccgagacttttactgagggggtttctatttcagactccgttttcccacctggaaagcaggttccactctccctccggcctggaagggatggttttatggtgcttccaaaatgccaaacctaactccagggcagaagaggagactgaaaccaattaattttccaaaggttagagctacgaggaggggagaggtttagcatggtcaagttccccaagacatactaattgatctctctacagaatgcgggatttcagtgcccccaggggacactcagcaatgtttagagaccacttgaggttgtcatcactggacaggaggggctgctactggcatctagcacacacaggccagggatactgttgaacatgctgcagtgcccagacagccccaccaaggagaatgatccacccctaaacctagtgctgaggttgggaaatcctgctccggagtaaccaacaccctatggctttttcactcaagcagccgcttctccagcgcttacacctcctcagagattgccagatccatatgcagagcctgttggcgtgggacacttctgaggggtgtggcagggagacagcggacattcccatttaccagctgatcagcaggttaggagctaatatgaaatgaacaagatagaccctccccacctgccctgcagatcctctggtgggacactagggagggaggcctcctaaacccaaatgacagttcccaggatgcagggaggagtttacctatgcaaactggagagaatgcaaatggggcatctagagatacttactggacgacccctcccctgcctcgggtcttggaagaacagattctcagaggtctgccctgatcactgtaattttttttttattgaggtaaaattaatataacacaattaaccattttaaagtgacatttagggctgggcacagtggctcatgcctgtaatccccgcactttgggaggctgaggaagaaaggtcgcccaggagttcaagaccaccctgggcaacaaagtaagactctgtctcttacaaaaaaaaaattaggcacacatggtgttgtgcacctgtagtcccagctactcaggaggctgaggcaggaggatcgtttgagcctaggaattcaaggctgcggtgagctatgatcatgccactgcactccagcctgggtgacagagcaaaattgtgtttctttaaaaaaataaaagtaaaaataaataagaaaagaaaggagaggggaggggagaggcgtttagtacactcacaatgttgtgtaactgtcaccttcatctagttctaaaacattaagcagccactcccatttcccttgccattccccaggaacaacaaatctgctgtctgtctctggatttgcctgttcgggatatttcatatacatggaatcatacaatatggggtattttatgtctgcttctttcgcttggcataatgttttcaaggttcattcctgttctatcatgtatcagtacttcattccttttttttttttttttttgaaacggagttttgcttttgttgcccaggctggagtgcaatggcacaatcttggctcactgcaacctccgcctcccgggttcaagcaatcctcctgcctcagcctcctgagtagctgggattacaggcatgcgccaccacacccagctaattttgtactttttttagtagagatggggtttctccatgttggtcatgctggtcttgaactcccaacctcaggtgatctgcctgcctcggccttccaaagtgctgggattacaggcgtgagccactgcacccggcctacttcattcctttttatggctgaatactattccattctatgagtagaccacattttgtttatccattcacccactggtgaaatttaggttgtttccatcttttggctgttgtgaatagtgctgctgtgaatatttgtgtatgagtgttcgttggaatacctgtcttacgatccttttgtgtttataccttggagtggagttactgtgtgtcacatggtaactctgtgattaactttttgaggaaccaaggaatggttttctatggcagttgcactggtgtttttttgttgttgttgtttttgttgttgttgttttgagacagggtctcactcccattgcccaggctggagtgcagtggtgcagtcatggttcactgcagcctcaacctcctggggctcaagcaatcctctctcctcagcctcccaagtagctggcactacaggcctgcgccactatgcccggctaatttttcatattttttgtagagatagagtctcagtttgttgcctaggctggtctcggactcctgtgctcaagtaatcctcctacctcggcctcccaaagtgctgggattacaggcatgagccaccgcatctggccagctacaccattttatattcccaccagcatgagggtttcaatttcttcacatcttcaccaacacttgttttctgtttgtttgtttgtttttaatagctatcctagtggatgtgaagcagtatcccgttggggtttgatttgcacttccctgatcactaataccctcatgtacatattggccatttgactgtcttctttggagaaatgtctattccagcctcctgtccatttttcaattggattatctttttgttgttgtgttgtaaatgttctctctttattttttatttttttgagacagagtctcgctctgtcgcccaggctggagtgcagtggcacgatcttggctcactgcaagctccgcctcccaggttcacgccattctcctgcctcagcctcccgagtagctgggactacagatgcccgctaccacgcccggctaattttttgtatttttttagtagagatagggtttcaccgtgttagccaggatggtctcgatctcctgacctcatgatccacccgccttggcctcccaaagttctgggattacaggcgtgagccaccacacctggccgtaaatgttctttatatagtactagacccttatcagatacatgatttgcaaatagcttctcctattctgttacttgccttttaactttcttgataacgtcctttgatgcacaaaaggtttaaattttgataaagcccagcatatctgttttttcttctgtggatcatgcattaggtgtcaaatctgatcataatgttttatttatttatttacttatttatttattattttatttatttttgagatggagtcttgctctgttgcccaggctagagtgcagtggcatgatctcggctcactgcaacctccacctcccaggttcaagcgattctcctgccccggcctcccaagtagctgggactacaggtgtgtaccaccacgcctggctaatttttgtatttttagtagagacagggtttcaccatgttggccaggctggtctcaaagtcctgaccgcaagtgatccacccaccgcagcctctatctatttttaatttatctctttttttttttttttttttgagacagggcctccttctgtcacccaggctggagtgcagtggtatagtcattgtacactgcagcctctacctcctcggctcaagcaattctctcgcctcagcctcccaagtacctgggaccacaggtgcctgccatcatgctggccctgccaccatatttgaaattgcagccctgaccccttccactgtctatagtcttcaccatcttactacataacatagcatatatgatgtactgtataacatggtatatgcagtgtactgtatagcatagtatacatgatgtagtcatctcatttatttgcttctcctctgggaagcaggaggaagcttctcctcttgtctgctttgctctcaactgtgtccctagcccagaacagagtctggcacacagcaggtactgaatgaatatgtgttcagtgaatattgtgggtgagatagaaggtgaatatccacatttccctttagaagtcacctgatctgggtttgagatctgcagggatctactccagacaggagaacgaataattccacctgtgctgatgagttggaaggatctagagggcttgagatctttccactggggtcagtgggggtgggtgcacctccaacacccttcttttctttgaacaagatttttccttaattccccaatactccctttgaatatatgattttagccaccatcatagcgaattgcatcgtcctcgcactggagcagcatctgcctgatgatgacaagaccccgatgtctgaacggctggtgagtgatgtcttttctcagggtcttctccttggctttagcaggacattaatttttgggggagtggagcagggcacagaggaggctctcagtcctggagcccagagccagatcatgggaagcctaaatttccttttcattttttcttgaaccagagtctcgctctgtcacccaggctggagtgcagtggttcagtcatagctcactgcagcctccacctcctgggctcaagccatcctcccactgcagcctcctgagtagcagggactacaggtgccaccatgcccagttaattttcttatttttatctttttttgtagagatggggatctcactaggttgcttaggctggtctcaaactgcccactttggcatctgacataatttcaggcagtatactcaaatgaacattgttaatgttaataattatgtcttggccagacactgtagctcatgcctgtaatcccagcagtttgggaggccaaggcaggtagatcacttgaggtcaagagttcgagaccatcctgaccaacatggtgaaagcccgtctctactaaaaaaatacaaaattagctggatatggtggtgcacacctgtaatcccagctacttgggaggctgaggcaggagaatcgcttgaacccgggaggcagaggttgcagtaagccaagatcgcaccattgcactccagtctgggcaacaggagtgaaactccatcttggtgggggggaggcgaaaaaaaagaaacaagaatattacaaaggatacagatgaagagatgcaaagggtgagatataggagaagggtgtggctggcagcttctaggtagcttcaggagggggactggtcaccagaaagaccaaggcatgattcgagggttgcgactttcagccccaccccccaacctctgggagggcagaggggctgaaaatcaagttgatcaccaacggtcaatgatttaaatccaaacctctaatcatgccttggttttcccggtgaccaacccccatcctgaagctacctagaagctgccagccatcagtcaatccttagcctgcaaaaagacatccctttggagatcccaagggttttaggagctgtacaccaggaaacagtgtcaaagaccaaacatacatttcacaatgtcacagtcttctaaaaactataactagcctagcaaacctatgatttctagatctttgcattttcacttaaaataaagctaaataaaaagcgtccattgaaagactggtaagcaagtagaagtaccagtggcaagctaatgtggaaaaaaaaaatcattcaggcagagtgaaaatgattgtagctcgagaaacgttgctgtaacagatgggaaaacattcacattggggctctgatggagaagagcttgtagcttaatttcaaatatgatagattagcagctggaagccagaaccagccggaggttctgcagaggaactggaggtgaggatactggccacttatcagccagtacagaagtcctattccaaacctttaacaatctacatgccagctgagaaccatcctaaggggtcagatttaggagtgaggtcaatgcacaagctctagcctcaaataccttgaacgctgcatgtgacaagtaaattctctaaaccaatgctttccattagaactttctgcagtcacagaaatgatctccatctgccctgtccaataggattgtcacttgaaatgtagccagtgtgactgcagaactgtgttttttattttattgcatttaaattaattttaattgaaatagccacatgtggcctgtgactgtcgtattgaataagacaggtgcaaacaaataattctgtttagctgagtgatatgtgaggttggcccaaaaggaatgaaggaggaaggtgccttctctaggcattggctttgctcgcaaaaggctttggacaagagaactctgcaagaggcagtgaggggtggtgagtgcaggagggtcaggggaagtgagagggtgataggtactgatttctaggtgggctggttccctgatcttgtcaacatctgcccagcccaagacgctgaccttgccttctctcccttccaggatgacacagaaccatacttcattggaattttttgtttcgaggctggaattaaaatcattgcccttgggtttgccttccacaaaggctcctacttgaggaatggctggaatgtcatggactttgtggtggtgctaacggggtaagtggcgcgtgctatacgctttggatttaactagctgaaggattacgaggcttttggttggtgtggtccgggccaggctcaggaaggctgagcccttgtgttctccctccccttgttatgcgcctgcctcctttctgccaacaccccacctccatgtctcagctgtatattacagcagatgctttctgttacaattaaaataatagctcattattgttggctgcttccagagtgctttatgcccattctctaatttaatccttgcaacaacccactgaattaggaaatattaatattcccatctgaccactgaggaatcagaaactcagagtgtaacttgcttaaggccacccagcaagtaagtgatggaactgggagatgaacagaagattatgcattccagaactcaaggttttaagtgttgtacgtgcatgggtctcttgatttgcttgaggatatcttgcttttatttcaacttggtgaatgttttttgagaatgtctgggtgcaagggattgtgattatgacaaaggagaaaagcaagctaaataaggtacagttactgtcttcaaggagttttcagatccatatatgatgaactgtggttgaaatgtgtatatgctttcctctaagcaccctgtatgaggtagcacttgctggtataacaaaagatccaaagctaggaaatgacttaaacacggcagaagtttatttgtcactcatagaaaattcaaaattgagctgggtgtggtggtgcatgcctgtaatctcagcactttgggaggctgaggtgggaggatcacttgagctcaggagttcaagaccagcttgggcaacacagtgagaccacccccccatctgtaaaacataaaataaaataaaaattaaccaggcatggtggtacatgcctgggagaattgcttgagctcaggagttggagggcacagtgagctatgatcatccaaccgtgctccagcctgggcaacagagcaagaccccatctcgaaaaaaaaaagtccaaaataattgttcctagttgacaggctcatctcctccaatgactgacggaccctgacccttgccatattgtggctcttcattgtcagcccacatcatccaataactccatgcttgtctgtatcaaaccaggaaggagaagtgagcatagaaggtgatacttggaaaggtttatgagtttggaaggggtgtgacccatacctgttccattcatatcctattggctagaactcggtcacatgaccacacatcactgcaagggaagctgggaagtatcagattgtgcttagaagaaaagggaaatggatttggagaatgacctactagtctgtcagggaccttaaaaacttttattagattccagtagggacattagtatctggtaccaatggctggttcctcctcttcccactctctactctcctctcagctaagtctgggctcttctattctaagacccttcttcactggacacctttttcatagtaatcatttacaggatcatagctttccatgttttgttgctgctccaggttctgtctctcttggcggatgtgatgggttgcagcacccacactgtgctggccgggctctcacaatgcagatttgtttcagagcaatgttgcctctcacagaaggagctgtggcctattgggctgtttctgtagaggccttcagatgtcagcagtctgttgtaaggactctgggctagctctcatgggcttgggtgttcacagagggatctttgttggctgtgctcacagttcggtggcttgggaccttggtgggttccaagggcatattatggtactgggcacttttctcttagtctactaggaaactcatctagaaacagcctagtggctaacttttttattgtttaaaaaatgtaaagctgggcagggtggctcatgcctgtatcccagcacattgggaggccaaggtgggaggattgcttgggcccaggagtttgagacgagcctgagcaacatagcaagaccacatctccacaaaataaaaattaaaagtgtataaagctgggtacagtggcacatgcctgtaaccccaattactcaggaggctggagagagaggattgcttgagcctaactagtttgagaccagcttgggtaacctagcaagatcccatgcaaaactaagtagagaataatagagcaaacacctgtgtatacattcatttattcaatgactatttattgaacacttctgtgtgccaggtcctgttctaggctctgggacacagcagtaaacaaaatagaaaaatcccctgtcctcatggagctgagagtctactgatggagatggacacaattgatgaatgaatctagtgtgtcagatggcggtgaggggtacagaggaaaaataaagcaggggagggatgggatgtgtggcaggcaggggtgaggggtgctggaagccagggaagacttcactgggcatgtgacatctgaatgaaaacctaagggaggtgagtgagtgagccatgaggagagctggaacagagtgtcaggcaaagggaacagccagtgcaaaggctctgaggctggactgtatctgacatgtttgatcaacagtaagaagacccacatggctagagaaggtgaccagaagaatggggagaattggggatagagaagtaatggagtaacctgctatcaaaacacaacctttctctttttttttttttttttttttttgacaagagtctccctctgtcacccaggctggagtgcagtggtacaatctcagctcactgcagcctctgcctcccagtttcaagtgattctcctgcctcagcctcccaagtagcttggattacaggcgtgtaccacaacatctagctaatttttgtatttttagtagagacgggtttacgccatgttggccaggctggtcttgaactcctgacctcaagtgatccacctggcatggcctcccaaagtgctgggattacaggcgtaagccactgtgcccagcaaaacaaaacctttctaacctttctaatccctgttttctccctccctagacccattcctttctctcccccatccaggggcactttcctgaattttatgtttattatttgcatttatgtattcacactttggctgcctaagtatataagaaatatatgctacctatttttacacttcaaaatattttttaaatagcatcagagtgagaatagtttacactttgactacatgcatagataagaaatatgtgggctgggaatggtggctcacacctgtaatcctagcaattttggaggcaaagatggaaggattactttaggccagaagtttgagaccagcctggccaatgtagtgaaaccctgtctctacaaaatgaaataaaatgtaataaaatattcagctgggcatggtggtgtgctcctgtggtcccagctactcaggaggccaaggcgggaggatcacttaagcccataaggtcgacgctgtagtgagctatgactgcactccagcttgggcaacagagcaagaccctgtccctaaaaaatgttttttgttgttgttgttgttttttgtttttttgtttttttaataaaggccaggtgtgatggctcacacttgtaagcctagcactttgagaggccagggcaggaagactgcttgagtccaggagtttaagaccagcctgggcaacatggtgaaaccccatctataaaaaaaatgcaaaaaattagccaggcatgatgacgcacgcctgtagtcccagctactcaggaggctgaggtgggaggatcacgtgagcccaggaggtcgaggctgcagtgatccgtgattgcaccactgcactccaggctgggcaacaaagtaagaccttgtctcaaaaaaataaaataaaataaaaaataaaaaaaagaaaagagaaagaaaaaaagagatatgtggtactgtttttcaaacttcacatttctctaacctgacttttgtgttcaacatgagataaatctgattaataaaaatagtttccatgcatccattttcatgactgcatagtattctgtggtaggagtatgctgccgtgtatttatctatttggattgtttccagctttgggctattttgacccaaagtgtccctgctttctcccaagtgagtttctctagggcacgtacccaggagtggaactgctgagttgtatactgtgtgcatcctcagccccactaggtattgccaaattgctctgcaaagtggttgtgccaattcatgctccctgggggctggcttctgctggctgaggctggcttgaccttgctggcaggaaggagccttaaaaatccctgtgtggttttttttgttttacttttattttaagtttaggggtacaagtgcagatctattacatgggtaaacttgtgtcttgggggtttgttgtacaggttatttcatcacccacgtattaagcctagtacccattagttatttttcttgatcatcttcctcctcccgccctccaccctccaaaaggccccagtgcgtgttgttcacctctgtatgtccatgtgttatcatcatttagcccccacttagaacacgcagtatttggttttctgtttctgcattagtttgctaaggataatggcctccagctccgtccgtgttcctgcaaaggacatgatcttgttctttttcttggctgcatagtattccatggtgtatatgtaccacattttctttatccagtctatcattgatgggcttttgcagccctgtttttttttttttttcataataacacggttatgggaacacttagggaagctcatatattattgagcagtgtgatggttaatattgagcatcaacttgatcagcttgaaggatgcaaagtcttgttcctgggtgtgtctgtgagggtgttgccaaaggagattaacatttgagccggtgaactaggagaggcagactcacccccaatctgtgtgggcaccatctaatcagctgccagtgtggccagaataaaagcaggcagaagaagttggaaagagtagacttgctgagtcttctggccttcatctttgtcctgtgctgaatgcttcctgccctctaaaatcagattccaagttcttcagcttttggactcatggacttacaccaatggttagccaggagctctcaggcctttggccacagactgaaggctgcactgtcagcttccctacttttgaggtttgaggactctgacggatccaccactggcttccttgctcttcatccttcagatgggctatcgtgggactttaccttgtgattgtgtgagtcaattctccttataaactccctttcatatatacatctatcctgttagttttgtccctctgaagaaccttgactaatacagacacctagtgggtcccaataagtgatcattaaactgaaggcagtcattcagtaggtcagtttgtcacttgtgtttgtatctccctgcttacaacaaggtggcctttcttctagtttcctgtcatctgatggaagagattctagactcattcctctagaggagaaatacttcatctagaacagataggtcctaagggtgagagctcatcgttgggatgaatgaacccactgaaattttatgcaagaagaaaattgtgtatatgtatatttttttttctggtctgtagtttttattagattctcagggaatcctgatcctatcatgaagaccttctattctagattgggttcctttcacatccccttctcctttcttgttgaattctccatgcatttctttcacttgcttttcttgctcttatttctctggtagtcagttatcctttttgtctggtggttctatctccttcaaatgaggcacattgctcaaattttattactccaaattccaaggtgctgtttagtgtcctgttgggttgtaagctaggaacagggaggggaaagtaaaacattctgcatgagctgggtgcagcgggcaagcacctggaattccagctactggaagctgaggtgggaggattccctgagcccaagggtttaaggccagcctgggcaacaaagtgagattttgtcttaaaaaaaaaaaaaatcccagctgggctctgtggctcatacctgtaatcccagcactttgggaggcagaggcgggcagatcgcttgaagtcaggagttccagaccagcctggccaacgtggtgaaaccccatctgtactaaaaatacaaaaaaaaaaaaaaaaaagcctggcatggtggtgtggtgtgcactggtaatcccagttatttgggaggctgaggcagcagaatcacttgaatccaggaggcagaggttgcagtgagctgagattgtgccactgcactccatcctggatgacagagtgagactctgtctcaaaaaaaaaaaaaaaaagaaagaaaaaacacgcgcgcacacacacacacatcatgcagacctagccttctgccaatgtcaatggtagagaaacacagtagacacttaattctatgtttcagagaggaggggactcaaatatattaatttgacattgagacagtgatgactttaatgagtactttctttcctttttttttttttttttttcgggacagagtgcagtggtgggattttggctcactgtagcctccacctcctgggttccagcagttctcctgcctcagcctcctgagtagctgggactacaggcatgcactgctgtgcctggctaatttttgtatttttagtagagacggggtttcacactatcagccagactggtctcgaactccggacctcaggtgatctgcccacctcggcctcccaaagtgctgggattacaggcatgagccaccgtgcccggcctaatgagtactttctgattaacctgttgccctctcagattcctgaagcaaaccacagcgttaaaacgtgattcattttgtgtggaccaccacggtgtttaccttcttcttgggtgaagtttggtggaaaagatcttaccccggacatctgtttgttctttgtaactcagagcctcagagaaatcctaactttataatgttgtcaaacccttgtaaggcatgtttttattgtatttgtgttctgatcatgaaactgaaaatgtgtaagaggaagatttcagaagcttggctgtatgtctgagatgacagttcttttactgtcattctcaaatatatataaatattgaagagatcaaataacacaaatcgtgcatgttaagaaaagagactgtgaacctcaccagagaggggtgagcacaattttttttcttttttattcacagggttagcactgtccctttcacataataaatgctcagtaaaataaatggttgttaagccggaaaagggtaacacttctgataatgagtgtcctgggaaatttactaagctgtttagaagatgggaccaacacactgatagaaatagtcagatagtccagaagtctatggcagatgccctgaacatcagatgagatataagacagagaagctctgggtctttgccagctctgacattttatgactctatgaaacggaaggttcctttttagaagggtctataaactgtctcaggctttgggccattttgttgaagatcagaggcaaggaaaagacacaactacacaggaaccatcagggaaagatgttgttttttggtcttgaagcatcattgaatttttttttttttttttgagacggagtttttctcttgttgcccaggctagagtgcaatggcatgatctcggctcactgcaacctccgcctcccaggttcaagtgattctcctgcctcagccttctgagtagctgggattacaggcatgtaccaccaagcccgggtaatttttttgtatgtttagtagagacgaggtttctccatgttggtcaggctagtctccaagtcctgccctcaggtggtccgcccacctctgtctcccaaagtgctgagattacaagcgtgagccaccgcaccgggccgcatcattggattttaaggctccatggattctggcaggtccagcccttctgttttactcacaaacaagtggtttgtccaaagtcacacagagatggtggcaagagatctagaataagaaggtgtcttcaagtcatggagccaggaaccctggctttttgggcaatggaagtggtataaatgtttaatatcacccctcaggttctgccactagagcccagctctctcttccttcctcttgccccctgactagcctatggcctctttccagagaataagaaagggatcctcagagaataatcccagttcctcgctttttattatatagttgaggaaaccaagtctcagaggggtcagtgtcttgaccatacacctctcatgtcctctctcctttttgattaattgaataaatacatgtagttgcttcttacctcctttctttcttcacccctgccccatgcacctgctcttagttgccttcacatgtaaacagcattccaacaacaacaacaaaacacaaccagcattctaactcatgagaccagcaacagttcctataaataccagcagcattttattttaatgtctctctgcagtagtttctcccctccatggatcagtcatccttggtaccaaaaggattccccactgtgacacaaatgctttttgtcattctcagtgagttataccattgagagagcatcgatctttttattgttcaaagcttttggttgtcatgatatttgctggaccatgtttcaccaggaaccacatcacttcctagcagcaggagctattttcttccatcttctaacaacaccagcagtgacagtgataataatgatgttagctgccatggtcgttattcttatcatttattgagtacttactatgtgccagggactacattaagagttttatgtgtattatcacattgagcctcgctagcctttgtacagatgaatctgaggctcagagaggttaagctgctcacaagggagtcacacagctggtaaggggtggatcaggatctcagcctctctgctaggacacttctctaaacctagaataatactgggcctgtgttaagttcagcaaagagctgtattcaacccagtgtccttaggaatgtaatgcctgttattaacaacagtggcaacattgataagctgaaacttatgaggtgcttacaatatgatatactatatattatatacatacataggcacccacctataatctcagcactttaggaggccaagtcaggaggatcacttgagcccaggagttcgagaccagcctgagcagcatagcaagatcctgtctctgtaaaaagtttattttttcagttggccaggtatgttggtacatgcctatagtcccagctaatgaggaggctgaggcaggaggattgcttgagcccaggaatttgaggctgcagtgaactatgatcacaccactgcactccagcctgggtgacagagcaagactgtctctaaaaataaaaataaaaataaaattatttcaactctcaaggttaaataaatactattattattcccatttacagatggagcaactgaggctcaaagacattaaatgcttactgtcttagtctgttttctgttgcttatagcagaacacctgaaactgagtaatttataaagaaaaagcaatttatttcttacagttatggagactggaaagtttaagatcaaggctgcatgagctataatgcacacacactattgcactccaggctgggtgacagggtgagaccccgtgtcaataaataataatataaaataaataaaacaaatttcaacatgagttttggaaggtttgaaatattcaagccagagcatctgtctcataagtggtggacccaggatttgaactaaggcagatctggatctagaacccattttcttgaatcctacgctatttctctaaggtcaagtttgccaaggaaaataaacttgagaatttgaatagagctctctgacatgggaagtcagggtgatccttccttcccctccctgatcttgggttccactatggctgggggaaaacaggagcagaagagatttcaagaaatgagagattggcctagcgccatggttaagacctggacttcagagtcagaggaagctcctccctctatgacagtgagaatgtgggttgaactcactgaacctcagttttctcacctggaaaaagggagtaaaactagtgcctagctcctagggtttgcatcacacacgaaagttggtgaactgaaggaaaaaaacttaaattcttgtgggggagcatgtgatagatgctacaaattctccatgccttatttacctagcttacgtctaagttcacctgcagcttcctcttggtacactcccatctctctacatctctgttggagggcagtctctggcatcacagagtttgctgagccagatgcttaacaacctcggtagcatccctcaaccagtgagctagggagtcagtgtataaataccctggcttccccattgctcagtgggaaaacactgaaatatgttatacagcatcatagaggtgcctcagtaaaattgaatcctagttgttcacataaaacccattcactagtgtaccctttaccaatctctctcttcctcattcctcacttgtaattccttgcattacctcccaaattaaccattggaccctagtttttgccttggggtctactcggcgctaactcaaggagcggaagttggaagcttagcgggttacaggtttcagcaccctggacagctcccagcacaccgtattgtgctaaaatgttctcttccctccctctgcctccagctggggtggagagggactgagtaaaggccagatggccaggtgaccttgttccatactgagcttcttggccattttccctgtggggctggagaagaccttgccatccatctctccgcaggtttgggggccgactgaggtcttgttttctcgaattgctatgacaaatgccagcctgcctccaaggggcatctgtcccactgcctctacagtttgcatgcctaatgactcctctcctctcaccagggcagggaggtggctgcctggtgggccgcttgaagccgggagaccaagatcatgccactggactcgcaacaaaccgagactcttttttttttttttttttcctcgagacagggtcttgctctgttgcccaggctggagtgcagtggcgcgatcttggctcactgcagcctccgcctcccaggttcaagcactcccacctcagcctcccaagtagctgggattacaggcgcacaccaccatgcctggctaatttttgcatttttagtagagagggggtttcaccatgttggccaggctgatctcgaacttctcccctcaggtgatccactcgccttggcctctcaaagtgctgggattgcagctgtgagccaccatgcctggccaacagaataggactctgtctcaaaaaataattttttttaaacattgctttgcaacccagctgcttcttgtgcaggcatctctaaatgaggacagccagtctacatagacacgtaaggaagcatagtggttaagacctggtctttggggttagagtggattcccaacctgactccactgtttccaagctgtgtgaccttgggcaagttactgtacctccctgaatcttccatttcttcatctggaaaatgagagtagtagcatcccctgacttggtggggcatggtggctgatgcttgtaatccaaacactttgggaagccaaggtgggtgaatcgcttaaacttgggagttcaaggccattctgggcaacatggtgaaactccatctctacaaaaacaaaacaaagcaaaaattatctgggtgtgatagtgtgtgcctgtaattccagctactcaggaggctgaggtgggagaatcacttgagcccaggaggtcaagtctgcagtgagccgtgcttgcaccactgcagtccaacagagcgagaccttgtctcaaacaaacaaaacaaaacacaaaacaacaacaaaatactaccaccttatggagttgttttcaaggttcaatgagttaatgtctgacccatgctgggctgggtttatggatgttacttgcccagggacagtctgaagaaagagaaagtgatatagtccattgggcctcagcttcctcatctgtggaatgggaataataattgcacctacctcaaaaggtaaaagtcagtgagatacatataaggcattcagaacaaaaactggcacagaataagtgctcaattatattagctattgtaagactaataactatcattataatgatgataataattattactacttccccaggcccagttccatagaccagttagttaactgtagggaacgtttgctattattagttgggttcccaatatctgacctccctttccaatttagggagaatcctcccctttctataaagtactgctggtctatgggatcccaccctcactaataagttgaaggtgaaagggattcattgtcaccccatcacctggtagtcagggcatgtgatttaaacaaccagggccaggcgcagtggctcacgcctgtaatcccagcactttgggacgccaaggcaggaggatagcttgagccaagcccaggagtttgagaccagactgggcaacatagtgagacccctatctcttaaaaattttttaattagctgggggtggtagcacaggcttgtagtccccgctactcaggaggctgaggcaggaggattgcttgagcccaggaggtcaaggctgcagtgagccgtgatagtgccactacactccagcccagcctgggcaacagggcaagatcctgtctcaaaaaacaaactaataaaaaactcaaccagtcacgttttcctacccaggaatttgaaaatggaccaagtgatccaaacatgatggtttggactctttcatggcctcctgctacaggagaaggtcaggctggctacattgttcctgctgatttcccaaatcccctcttctggccccctgttgattatctgagtttcctaaaaatcccttttatgcctaagatagccggtcagtgtttggttttgcaatcaagaacccagactgggccaggcacggtggcccacgcctgtaatcccagcactttgggaggccgaggcgggcagatcatgagatcaggagatcgagaccatcctggctaacgtggtgaaaccccgtctctactaaaaatacaaaacaaaaaaaaaaaaattagccaggcatgatggcggtcacctgtagtcccagctactggggaggctgaggcaggagaatggcgtgaacccgggaggcggagcttgcagtgagctgagatggcaccactgcactccagcctgggcgacagaacgagactccgtcaaaaaaaaaaaaagaaaaaagaagaacccagaacccagactgatcctgagacaaagatttgagggcaacgaatcacgaggtcaggaaatcgagaccatcctggctaacatggtgaaaccccgtctttattaaaaatacaacaaattagctgagcgtggtggtgggcgcctgtagtcccagctactcgggaggctgaggaaggagaatggcgtgaacctgggaggcggagcttgcaataagccaagatcgcaccactgcactccagcctgggtgacagagcaagactccatctcaaaaaaaaaaaaaaaaaatttgaggacaagtggtttgtttggcaataccaggaaacaggggaacaggatagtcagaaaagaaagagaaagctgggcatggtggctcactcctgtaatctcagcactttgggaggccaaggcaggtggatcacctgaggtcaggagtttgagaccagcctggccaacatggtgaaatcccgtctctgctaaaaatataaaaattagtcgggtgtggtggcgtgcacctataatcaaaataaaataaaatcaggatattttattttaaaactctgtcttagtgtaactcatatttacctcttctgtatgctcctttgcatcagttatatattgccataatacggctgtgtaacaaacaatccccaagacccagtggcttataatgacaagcatttatttagctcatgattctgaagggtggcagtttaggctgggcccagttgggtgctttatctggtctcagttgagctcattcatgcatctttggtcagctgcgggtcagctgggtggctcttctgtttggctgttagctggctgcagactggtccaggatgacctcggctggaatgactgtgctccactccctatggtctttcaccctccagcaggctagcctgagctagttcacatggcagcttttcatcctccagcaggctagcctgagctagttcacgtggcagcaatgggattctaagagaaagaggaagtgttcagccttcttaagggctagtcccaggaatggcacaacatcgtgttggccactgttgtccaaagcaagcaatgaagctggtccagattcaaggaatggggcaacagagcccatctggtatttacctggggccactggggccccattcctgttccctggggccttttgccctgacttctgtgggccctcagagcatattttcagattcctttccatccctgaccctcagcaatcaatgtagatgacgtgtcattactgtgtcacttgcacagagaaaaggaggaaaaaatgtcagcaaaaactctgctgagagcagagggcccatcatacagcaagctggaaagaaaagtgggaatgattacacagcctcctcagatgcttccagcttttatcaaatctcactgtgatatctgagttctgaaccctcacaggtggttggcgtgcaagggaagagatttcttgtctgccatgctgacatgcacagacacgcaacctggctccctctgtccactggggctttggattttgtttgttgaaatgttacccactcctgatcagagctggatggaaacctggctctgattccattggctcaggggctcaggtgggggcagaggccaggctggttgggtgtctatgtggagaccttaactcttctccctcccgccccaactctttttgtttctttttttttttttttttttttttgagatggggtttcactcttgttgcccaggctggagtgcagtggcgtgatcttggctcactgcaacttctgcctcctgggttcaagcaattctcccacctcagcctcctgagtagctgggattacaggagcacgccaccatacctggctaatttttgtatttttagtagagacagggtttcgccatgttggccaggctggtcttgaactcctgacctcaggtgatccaccctcctcagcctcccaaaatgctgggattagaggcgtgagccaccacacctggcccttttcttttcttagctgcctccacctctcttcccttctgcagtgttaggtttatggaaaccgaggccggcgtagagatcaacttcagagagcatgaactgagcatctgctgggtcttagatcctttacatagcttatcatcttcaaaccttctcacagttctgtgtggctagagccaggatttggacacagctctgccccactgtagaaccaggcttccttctgtccactgtcaaattttagagggagaaaatagggaaagggacaccagccttctccacgagcagcttctgcccactcaccccagggactttgcacatgctgtgtgcctgtgtctgagatatgctccctcctctgtatctgcttaattcttacccagacatgatacataaagtatttaacatccaggtggcagggacaccagctaacctgaaaagaggttcccctgttgtgccacatgtgtactcattgtttgctgcattgtgggggcagtccaggggccttgaagaggggccaaggtgccaaaggggcactctcaggcctcaaggaagtacatgtttactgatatgatactgtctcttcctccaggaaggaagccttccctgatctccccactgcatgcccactatgataccagtttaggtcccctctttatggccatctgtggcatcagtgtgaatcctcttaatgttgtctatttggttaatcatctgtctccttcctctggggggtaaagacagaaccacagagcctcgtgtagaacttgagaatggggttcagtaaaaatctgttgaatgcataaatgggtgattgagtgaatgaatgaatgagtgaatgaatgagtgagtggatgaatgaatgagtgaatgaatgagtgagtgaatgaatgaatgagtgaattaatgaatgaattcatagctgataatacaggcttcatggcttttgttaggcttgcccagacattgctaggggatggacagaaggaagaagagctatacttaattccagtcctgttgttctgtagcaggaggagaaaaacagggactgcccagcctgctctgggtggattcaggagcagctgaggttcctctcttatttgcaaacagggaattcaaaaagccccaacctcagaatcacactcgcctcagcagctgtaccagccaaggggacaatgtgggaagccttgggcaccaggaatgctgagtgcttcgaaaaagcgaaggctcagggaacaatccctgatttttcattcccttgtcctttctgaagaaacaggcaaaggcaggccaggcacggtggctcacacctgtaatcccaacactttaggaggccgaggctggtgaatcacttgaggtcaggagttcaagaccagcgtagccaacatcatgaaatcccatctctactaaaaatacaaaaattagctgggtttggtggtgcatccctgtaatctcagctactcgggaggctgaggcatgagaatcacctgaactggggaggtggaggttgcagtgagctgagtctgcgccactgcactccagcctggatgacagagtgagactccatcttaaaacaaaacaaaacaaaaacaagtaaagccttgtgtgtttttaaattgtaggttcagcagcaaagctctgtaataaggagctggaccctgcagtcagacagtcatgggcttctccagtgcccagccgagtgacccgagggagttatgataaacaccaacattcatccacaatttgtacctagtgctattctcaatatcttgagtaaattatctcatttaatcctccaggcacatctttcttggtaggtgccgtcattgtccccagtgtacatctgggaaaatgaggacaggctggcagagcacccttcctgctcacctctgctgctctgctgacctctggcaagactgttgtctctctgagcctcagtttccccatctgaaaattggggcctgtattagcccgttctcacattgctataacgagatgcttggctggggctgggcgtgatggcttatgcttgtaatcccagcactttgggaggctgagttgggcagattgggagtgtgagaccagcttgggcaatatagcaagaccccatctcttctaaaaaaaaaaaaaaattagccaggcatggtgatatgcacctgtaattccagctacccaggaggctgaggcaggagaattgcttgaacccaggaggcagaggttgcagtgagccaagattgcgccactgcactccagcctgggagacagagtgagactccatctcaaaaaacaaattatttttaaaaaattaaaaaaaaaaatgcctggctgggcacagtggctcacacccataatcccagtactttgggaggccaaggtgggaagattgcttgagcccaggagttccagaccagcctgggcaacacagtgaaatcctgtctctactaaaagtacaaaaattagccaggtgtggtggcacgcgcctgtggtcccagctactcaggagggtgaggtgggaggattgcttaagcctgggaggtcaaggctgcagtgagcaatgattatgccactgcactccagcctgggcgacagagtgagaccttgtaaaaataataataataataataaataaataaaaaccctgagactggggtaatttataaagaaaagaggtttaattgactcacgattctgcaggctctacagaaagcatggcagcatctgctcagcttctgggaaggcctcaggaaacttacaatcatggcagaaggtaaagctggagcaggtgtcctcacatggccagaacaggaggaagagagagagtggggagatgctacacacctttaaatgtccaatctcacaagaactcactcacgatctcgagaatagcaccaaggcggaaatctgcccccatgatccaattaccttccaccaggccccacctccaacattggggattacaattcgccataagatttggttgcggacagacacagatccaaagtacattaaaagtaatggcaaaaaccacaattacttttgcaccaacctaatatctcaggggctcattgtacctatttcacaggacaaatgaaggtatcagtaataacagtagcctgtagtcccagctattcaggaggccgagacaggaggatcacttgaacccaggaggtcgaggctgcagtgagctatgatcacgccactgcactgcaccctgggtgacagggcgaaaacttatctctaaaaataataataacaacaacaatagtgaacacagatataacatgtgtgtggccaggctgtgcccttagggctttgcagggattatttcattcactctcaatctccccattttacagatgagaaaactgacgttcagaaaagctagaggacttgccccaagccacacggctaggaagtggtggaattggggtttaaatgaggaagcttgacttcagtgtcgaagctcttaactgccacactcaatacatggagtagaggttgctgattctgtgattatctgattctggaaagtaaagaccctgtttccagacgtttgctgcttgacttagttcccaggggatggccactggatgatgcagtgttgcccaggagaggttagctagacacactgcaaccattccattgctaatacttatacttgctcttgttctgctgggtgctatgcagggaagggctgtctgagccctttgcaagaattctcccattggtgcctcccagagattctgaggttggggctttttgcatcccttattagcagatgagacaccaaagcccaggtcaataatctgacctgcatcccccgcctaccagccagaccaaggtcacttccccacaatgcaggccctgatccaaggctctgggtgcaaaccagtttccatgtccctgggggtccatcttcttcagctgactttttttttttttttttttttttgagacagcgtcttgctttgttgccgaggctggagtgcagtggtgtgatcatggcttattgcagccttgacctcccaggctcaagcaatcctcccacgtcagcctcctgagtagctaggactatgggcacacgccatgatgcctgggtaatttttttttttttttttttgagacagagtctcgcactgtagcccaggctggagtgcagtggcgcaatctcggctcactgcaagccccatctcccaggttcatgccattctcctgcctcagcctctcgagtagctgggattacaggtgcctgctacctcgcctggctaattttttgtatttttagtagagacggggtttcaccgtgttagccaggatggtctccatctcctgacttcgtgatccgcccacctcagcctcccaaagcgctgggattacaggcatgagccagatgcctggctaatttttaagtttttttataaaggcggggtcttgctatgttgcccaagctggtctcaaactcctggcctcaaaaagtcttcctgcctcagcctcccaaagtgctaggattacagacatgagccactgcacccagcctgactttttttctaactgaaaaattaattatatatattcatggagtacaatgggatgttctgatatatgtttacatttttgaatgattaaatcaagccaattaacatatccactacatcgcatacttattttttgtggtgagaacgcttaaaatctactcttttagcaattttgaaatatacaataccttatgttgtatattacattatgttgtatagtacgttgaaacatacactacaatacgttatcattaattgtggtcaccatgctgtgcaaaagatctctaaaacgtattcctcctgtctgactgaaactttgtatcctttgcctaatatctccccaatccctccaccaccagcccctggtaaccaccattctctctgcttccatgggttcaaattttttattttttgaaatttttaatttttatttatttatttatttatttatttatttatttttgagatggagtctcgctctgtcacccagtctggagtgcaatggtgccatcttggctcactgcaacctccgcctcctgggttcaagcgattctccagcctcagcctcccgagtagctggggttacaggtgcttgccaccaggcccggctaatttttgtatttttagtagagacggggtttcaccatgttggctaggctggtctggaactcctgacctccagtgatccacccacctcggcctcccaaagtgctgagattacaagcgttgagccactgcacctggcctaaaatttttttttttttttttttttttgagacggagtctcactctcttgctaggctggagtgcagtggcatgatctcagcccactgcaacctcagcctcccgggttcaagcgattctcctgcctcagcctcctgagtagctgggactagaggtgtgcaccaccacgcccagctaatttttgtatttttagtagggacagggtttcaccatgttggccaggatggtgtcaatctcttgatctcgtgatctgcctgcctcgggcttccaaagtgatgggattatgggccaccacgcccggcctcaaattttttagagctcacatataagcgagattgtgtactatttgcgtttctgtgtctggcttgtttcatcttagtataatgtcctccaggttcatgcacgttgtcgcaaaagatggaatttgctcctttttaaagactgaatagtacttcattgtgtacatatacacgccatattttcttcatccattcctttactgatggacatttgggttgtacctgcatcttggctattgtgaagagtgctgtcatgaacatgggtgtgcagctgactctgaggtgttagagggattacagctcctccaaaagaccaccgtcacccaaacctgctcctcctgccctattttctgtttaggtaaaggcggctttaaccccctgcagtgctctggcctcagacctccagatcttcctctatgcctctatgcctctttttctccaccccctgcatccaatctgttagcacatcttattggctctaccttcagaatctacccagaatccaccacccacctctcaccaccttcacagccccaccccggtccagcccccatctttgctggcctggactaaaccagttgcccctccaccccaatctggtctcttaacttcagtccttgccccacccccaggactgttccccacacagcagccagagggcacctgtgagccactgagtcaggacctggctcctctttgctcacaacctcacttggagaaaaagcccaaattctcctcacagggacccacaaactctgcccctgtgatcccccatccccctctattcccactctcctctccactcactcggcttcagctacacaagttccctgctgtcccttacacaccaagcactccccagcctcagggcctttgcacaggctgttccctctgcctggaacactcttcccccagatatctgcttggctcccccctcacttcctttgggtctttgctcaagtgtccttctaacatgtaactgcctcacctgcactgtgccaccccactccccgcctctaggcttaatttccctctacacccctgaagagcatctgccaagctatatttacttgtttattggttattgccaatcccctgcccccactagaatgccagctccatgagggcagggacttctgtctgttttgttcactgctattcccccagagcctagaacacagcctggcacatagtaagtattcactaaataatttgtaatatgaattgtgccagtaaaatcttccaggggcatcaagcccctgccatgactaggtggtaacatcctcaccccctgtccatgtgctatctcctcctgacctgcttgtctcattgttctaatggtggctcacgcctgtaatcccagcacttggggaggccgaggcgggcagatacctgagttcaggagtttgagaccagcctggccaacatgatgaaaccctgtctctactaaaaatacaaaaattagctgggcgtggcattgcacgcctgtagtcctagctactcgagaggctgaggcaggagaatcgcttgaacccgggaggtggaggttgcagtgagctgagatcatgccattgcaatccagcctgggccacaagagcgaaactctgtctcaaaaaatatatatatatatttcattgtggtaacatatgcataacataaaatgtaccattttttaagtgtttagttgagcggcgttaagtacattcatattgttgtgcaaccaggaccgccatccatctccagaacttttgcatcttgcaaaactgaagctctgcccccaggaaactctcactccccgctcccccttcccctctccccgactcccccttcccccctccccactccccccaccctactccacactccccactcccccagcccctggcacccgccgttctagtttctatctctgtgaatttggctactttgggtcccccctgtgagtagaatcatacagtatttgtctttttgtgactggtttgtttcgtggagcataatgtcctccagtctcatccatattgtagcatgagtcagaatttccttcttttccaggccgaatcgtattccattgtgtggatggaccacactttgcttatctgttcatccagatgggcacttggcttccaccttttggctattgtaaataatgctgctgtaaacctgtgtgtacaaatagctgagtccctgctttcaattcttttggatatagacccagaagtggaattttttttaaatcaagatttgacccactggggcccttagaggtctcattggctctgaagcttttttttttttttttttttggacgctttgaaactaaaaataggagtgaggggcacagtgaggggggcacacatctctcgtgtcagcgttttttaaaaacaccccgggaggaagatgtgtgaaatccctcccttccccccgctcccaccccctccaagatctcaaaatacctcttgttttaggaagcggctgtgacatcaggcaggcagcgtgtggcatctgagacacaatatcgcaagtggctgggagcccagagaaaccaggacaggcgtgctggggatgtggactagagatggagctaattttagtggctgaagaggctgcaagaagagagagaaagaggggtgtgtgtgtgtgtgtgtgtgtgtgtgtgtgtgtgtgtgtacgcacagtgatagaggctggagggggagaaatgacagataaatcagcttgggcaaagaaagctaatgggcagaggagcgagacccagctcagaaggtggtcagcaaatctaaagatgtgtgcccgagggtcaaggtggtggggggattcataggcaagtggtagagaggctattccatttgcagaggctctctctgtttgaggcgtgattcacctgtgccgtcctcaaggccattctgagaacaccactgttgttttcctccttttatgagtagggaaactgaggcattgaactgcttctattcttcagtaagaagcagggggaacatatggtagaagcaaagaaatacaaacatgagggctctcggggtctacgtgattggctgtgacatccatgagagcggatcgcaggttgaaggaaacactggtggcagaaagtagctgaacatttggatttgggaatcccagtggacgtggcgaaaattctggcttttcccttcacaggctgcggggccactctgacctgcggtttccttatctgtgaaatggaacgatgccacctgtctcagcgttgttttgaggatgcgaggagatgatccgtgtaatatgcccactagggggcctgctccagggtagattctcagcaaatggtagtcatggtttttgttacatttggggatattggcaggtaaaaaggaaatacttcattcattccaaaattgctcactgaggttctactatgtgctaggccctgatgacacatcggtcaacaagacaggcctgctttctgcccttgtaaaacttcagttcaactgcattgcactcatcagcctaataatccaggtaaattgtgatgagaataacaactagcatttactatgagccctttacaaatattaacccatttaatcttctaaagagcctataagataagagctcttgccctgcgcagtggctcacgcctataatcccagcacgtcgtgaggccaaggcaggtggatcacctgaggtcaggagttcaagaatagcctgaccaacagggtgaaaccctgtctctgctaataatacaaaaattagccaggcatggtggcaggtgcctgtaatcccagctacttggctgaggtaggagaatcgcttgaacccaggaggcggaggttgcagtgagtcgagatcactccactgcactccaagagtgaaactctgtcacacacacaaaaaaaaacaacctgttattatccacattttacctatgaggaaaccgatgcccagagaggttaagtaactgtccaaaggtcacacagctacggagtggtagagctgggattcagacccaggagtgtgatcccagagtgtgtgtgtatgtttgtttgtttgtttgtttgtttgtttgtttttaccactgtgttttcctgcttctgcaatagaagtaatcaccagtaacactgagcagttgttatgtgccatgcccttaacacacatctccttggatctttggaaagaatcctaaaagggttgtttttcatgatccacattttatggagagagagagatcaaagcatagagagaggaagtaacttgcccaagatcctgcagctgaagactctagggttgcaaatttgggacggccctggaccctgcattccagcttctagcagctcatagggggaactctttatttatttatttatttatttatttatttatttatttattttgagatggagtttcgctcttcttgcccagcctggaatgcaatggcatgatctcggctcactgcaacctccgcctcctgggttcaagtgattctcctgcctcagcctcctgagtagctgagattacaggcatatgccaccacgcctggctaatttaattttttttagtagagacggggtttctccatgttggtcaggctggtctcgaactcctgacctcaggtgatccgcccatctcggccccccaaagtgctaggaatacaggcctgagccaccacgcatgccctgggggggaccacttttatcggtgcatttcttccattttccctgtgtctgtgtaaagataaacacccccaagccccttgactatgaactgtgggccataattagttaatggaaggtaaatgttttagagacggaaattgctgtgccatttttccccgctaggcattgttgcctgcatgctaatgcaacacaatgtgcctttcttctgtcaggcatttttagacaaattctattttccctaaaatattttgccaaagaaaatagcaaatggggaagacattcagaggctcaggcagagagaggacaccattcccttgggtttaaacagaatggcagagtggataacagcacagatcttgagttaggtggatgccaatttgtgatttatttcccagcaaaccaagatgctggctctctgtgtgcctcagtttacttatttgtcaaatgaggagaataatggtacctgtctctcaccagcttaccagttgcctctttagctatgtctaatctgctattaaccacgcccactatgtctttaattccaagtattagaattgttttcttcctacaagctgtctgatcttttttaatcctgcttcatcttttgcagtattgttttcctacagcaggatttctcaaccttggcacaattgacattttgggctaggtaattcttggccgtgagctaccaccctgtgctaagatacttagagcatccctggcctctcaccctactaaatgccagtagcagcccctccccagttgtggcagccaaaaatggctcagacattgccaaacgaaatgtcccatggagggtagaaacgcccccacttgagaattgttctataggtattttcaagcatgtcttacatttctttaagtataatatgcaaaagaaaaggctaaatctaaaaaaagcccataatatgcgaagaatttttataatcagtgtccaataacttaagtatctaaaattgttatggctttttttctgctgtctcttgtttcctgtgattcctcattctggtgccttgttttcttgaatgtcttgttatctttggttgtgtgaagctcattttccatgggacactattttttgttttgttttgttttgagacagagtctcgcttggttgcccaggctggagtgcagtggtgcaatatcagttcactacaacctcagcctcccaggcccaaatgattctcctgcctcagcctcctgagtagctgggattacaggcgtgtgccaccacacccagctaatttttttgtatttttagtagaggcagggtttcaccacgttggccaggctggttttgaactcctgacctcaagtgatcaacccgcctcggccccccaaagtgctgggattacaggtgtgagccaccgtgcccggcatccatgggacactgttgaagggagttcattgaggcctgcgatgaaggcgaaccctccatggacaatttgcatttactttttccaggtgtctgggaaactcccagtctaggaccatcttagacttttagaccaacaatgtgttgagaatttaggtcaccagtgtctgcaaaagccagcttgtggttataatttctcaaaaacttttgtttttctccttttctgcaaagtgccaaagtaacttcctcaaaaatctctgggaatggaaagacgggagtaaattaacttcaggtttcttacctgaaagtgatagcctattggggccccatcctacttggggagtggtgtgtctcctttgagactttctaacacgtgtgtaccctggactttgccccacccctgctccctaggaggccataaaacttgaagcagcagttccatgggttagacagatgcccttggggcaaaagtggttttaatgctctggtagatgctcaggttacctctgggaaattcttgacttcacttatttatttggggctgataactactaattgtcaggcctttcttgtttcaacaacatggacttcagattttatgcaggatttgtcatcgttttcagcaagagagtcagtcttattacccagcttactgcattagaaatagatgtctgggccaggcgcagtggctcacacctgtaatcccagctgtttgggaggctaaggtgggcggatcatgaggtcaggagttcgagaccagcctggccaacatggtaaaaccccatctatactaaagatagaaaaaattagctgggtgtggtggtgcgtgcctgtaatcccagctacttgggaggctgaggcaggagaattgcttgaacccgggaggcagaggttgcagtgagccaagatcgcaccactgcactccagcctgggtgacaggacgagactctgtctcaaaaaaagaaatagatgtctgttgtgtggattatttaaaagagtagatggccaagaactatgacttatgcctgtcatctcagcactttgagaggctaaggtggagggatcacttgaggccatgagttagagaccagcctgggaaacatagcaagacccccatctctgcaaaagtaaaataaaataagttagtgtgcatgatggtgcaggcatacctctagtcctagctactcaggaggctgaggcaggaggatcacttgagcctaggagtttgaggctacagtgatctatgatcatgccactgcactccagcctgggtgacagatcaagaccctgcctctaaaacataaaaataaatacaaattaagttaaaaaataaaataaataagtaatagaacatccagcacagttcttggcatgcattgactgttgttgtttgtttgtttgtttgtttgtgacggagtctcactcttgttgcccaggctggagtgcaatggcatgatcttggctcatcataacttccacctcccaggttcaggtgattctcctacttcagcctcctgagtagctgggattacaggcacgtgccaccactcctagctgttttgttttgtttgtttgtttgttttgtatttttagtagagatggggtttctccaagttggtcaggctggtctcaaactcctgacctcaggcgatctgccagcctcggcctcccaaagtgctgagattacagacgtaagccaccacgcctggccagctgttttgattgttaaatgaaggtggtatgaaagggaaggaagaacagtgacatttgcaagggacactccctggagggcagggcaagggggctgtggaggggagaagtcagagagtatgatacaggttgccttgggtgatgttttagattttagccaacattggcaaagagcctcatttatctctcagagtagctctggctactggaaatgctgcacaacttcaggcggactttctagaagaaaactcttggccaggtgcagtgactcacacctgtaatcccaacactttgggaggctgaggcaggtggatcacttgagctcaagagtttgagaccagactgggcaacgtggcaaaacctcatctctacaaaaaaaaatacaaaaattaaccaggcgtggtggtgcatgcctgtatcccagctacttgggaggctgaggtgggaggattgcttgagcctggggaggtggaggtggtagtgagccaagattgcaccactgcactcccatttgagtgacagagcaagaccttgtctcaaaaaagaaaaaaagaaaagaaaagaaaagaaaattctctctgggattcaatcctggcccacacagcattggcttcacttcacctccttctcccctgagatacacagcaccattcccccaagcttcatcaacttaatctctgatctgggtgctgtgacttgtccccattcctggccagaatttaaggtagggatgaacccactagccctccatcacgcactctgccataaaagcacaccacgtgctgattgctgtctttggtctcctttctgccttgccctctagactctgagctgcttggagacagaggccagttttgtccatctccaaatcccctaaagtcctgtggccagcaagcaggtaggacatctgaaagttcgtcagagagggaattgcttttctcttgagatgcaactagaacaagaatcttattgacctggagtagcttcaaggttgtaagagtatgtgtcagggttctccaagaccactctcaggtttgaaggtttgctaaaagggctcacgggacccagaaaagctgtgaaattcagttatggtttattacagtggaagaatacagataatacagattaaaatctgcaaagcaaaagatgcacaaggcaatgtccaggggagatcaggcatgagcttccagctgttcactcccagtggagttatgcaaacagtgctcaattctcccagcaatggtgtgtgacaatgtacagtgtaccgccaaccagagaagctcacctgagccttggtgtccagggtttttattggggctcagttacattgacatggagcacccatgtgactgactttaactgctgggtctccagcacactccaagatcaaactgataccgtgtgtcccagggccccagctgaacacaaacaggcagtcaccatagatcccattgtgagcataagctaccaggcatggcccaaagccctagatatacagatattctttccaggagccagccaagggccagtccttcctttggaatatgcagagtttgaactccccaaccccaaggagttaactctttactacacagaatataaatctcaccaagtctttcttcttgtcaagtcctctcaaggtgacccattgcttttagcagtgtctttgagaccctgcgtcatctggccttgacccatatcacctgtgttatctctccactctagctacattgaacttttcttttttgagatgtggtctcactccatcacccaggctgaagtgcagtggtacagtcacagctcactgcagcctcaaactcctgggctcaagtgatcctcccacctcagcctcctgagtagctgagcccacaggtgcatgccattacacccagctaatatttttatttttagtaaagatgggttctcactatgtttcccaggttggtctcaaactcctgggctcaagcagtcctcccatcttggcctcccaaagtattggcattacaggggttagccaccacatccagcccattgaactttttaaggatcccctagcatcctatactttctgtcactggatagccttggaattatttttccttctttttgaaatactcttcttctttccaccctttgctgtcaagtctcagaataggcattatttcctccaaaaaccctctcctgaccctccaaatctggatgaggacacttcctttgcccagagagcacctgttttaatcctctcaggtggctataataaaataccttaaactgggtggcttatacacctcagaaatttattttccacagttctggaggctgggaagatcaaggcactgacagatttggtgtctgatgaggggccatttcttgtttcgtagaaggggtcttcctactgcatctttccatggtgaaaagagttgaggcagctctctgaaacctctttcatgagagcatgaatccctctgtcttcatgatctaatcacctcccaaaggccccacttcctaatatcttcacattggtgactaggtttcaacatatgaatttgagaaagacacagacattcagaccatagcagtgctcttccaccaggttttttatccccctgtattataattgaggtttaaattatctgctttccttcccttagattgtaagctccatgagagcagggccctacccatccagtcattgtcctatcccccatgactacaacttcctgggtacataattaatatttattatattatgtagcaaaggtatgctgccatactaagagacccaaaaggccaccggattaaaaccttaaagaaaaaaaaataatttctctcctataatagctgcaaggttagccatgcaggttggcagggaagctcacttccacaaagtcactcagggattcaggctcctgttgccctcttcttttctaccaccaaatgatcttcagcaccatttgcacaatcaaaacttaactggtcttgaataggcagaccttgaatttctgaagtctcagacccaaaagtggcagctgtcacttccactgacatatcactgatggaaacttaatcatgtgatcataccaaactgctagggatgctgggaaatgtagttttgttgggaactccatgacttggctaaaattccattactgtagaagatggtgggggatgggggagtggtggacatccagtggttgctaccatatttattgaatcaaattgtcaaacaggacctatctgataaggggttcttttccagaattaactgaagtattaaatcaggggcaaaggcatgtcacctcatctttctctccctatattggctttctagggctgttataacagagtaacatgaacttggcggcttaaaacaacagaaatttattttctcttagttctggaggctagaagcctaaaatcaaggtgtcagcagagccaccttgacaactgctctaggaaagaattcttccttgcctcttctggtggctcctggcaacccttggtattctttgtctggcatccacttcaatctctgcctccatcttcatttgccttttttctctgtgtgtctatgtcctttcctcttcttagaaggataccagtcattgaatttagggcttactctaaatccaggatgatctcacctcaagatccttaattagttacatctgcaaagagcttatttcaaaacaagattgcattctgaggtttcggtaaacacgaatttgggggaaatagtattcaactcaattcactgctttacttaagaaaagagaccatgaagtgagcctccttctgcttgagagagagagcgagcctttctgtgcaataggtcaatgaatggatgcagctgaattccacataactttataaaaatagatggccagcccatggggtttgctgacccctgcccaaaaattccaaagtcaacagcagtctcttttttaatcatttctctattttttaatttatttttatttttatgttgagatagagtcccgctctgtcgcccaggctggagtgtagtagtctcggctcactgcaacctctaccttccagatacaagtgattctcctgcctcagtctcctgagtggctaggagtacaggtgtccgccaccatacccagctaatttttgtatttttaatagaaacagggtttcaccatgttggccaggctggtctcgaactcctgacctcaagtggtccacccacctcggcctcccaaagtgctgggattacaggcatgagccaccatgcccggccaggattttcttcattttaacagcattcttacttgtcccacatccattctatcctgggtctaattagataacaaaatctacagatcttgtttaactgacattgtcctgggggatactttttatcttttgagacaaggtctcactctgttacccaggctggagtgcagtggcctgataacagctcactgcagcctcgaccacctgggttcaagcgatcctcccacctcagcctccagagtagctggaaccacagatgcatgccaccacacctggctaatttttaaatttcttgtagaggtggggtctccctatgttaccaaaggctggtctcaaactcctgggctcaaaagagcctcccaccttaacctcccaaagtgctgggattacagatatgagccactgtttccagccttggaaatatagtctaagaactgagtcaataggcgattttgtcattgtgtggacatcatgtagagaacttaacacaaacctagatggtataaactactgcacacctcagttatggggcataccctattgcacctaggctgcaaacctgcacagcaggttactgtcttgaatactgtaggcagttgtaacacaatggtaagtatttgtgtatctaaacatatctaggccgggcacggtggctcacgcctgtaattccagatcacctgaggtcaggagttcgagcccagcctggccaacatggcgaaactccttctttactgaaaaatgcaaaaattagccaggtgtggtggcaggcacctgtaatcccagctattcgggaggctgaggcaggagaatcgcttgaacctgggaggtggaggttgcagtgagctgagatcatgccactgcactccagcctgggtgacagagcaaaactccatctcaaaaaaataaaaaataaaaaacatatctaaacagaaaaggtacagtaaaaatacagttataaccatatgggaccaccattgtataggcagtccgctgttgatcaaaacatatcaaaacatcgttatgtagcacatgactgtaccataaaccacacggcttcaaacaagggaaatgtattctctcactgttttggaggccataggtctgaaatcgaggtgtcaccagggtccctccaaaggatccgggggaggatccttccattggatttggagttgcttcactccagtctctgcctcagtggtgacagggcgttctcctcttccctctcaaagttccctcttctgctgtgtcataaggatacatatgactgcatttaggccccactcagaaaatccaggaataaactcttgccctcatattcttaactaaatcgtacctgcataccttattttttctaaataaggtagcattccagggattaggacatcaacataacttctggagggttcactgttcaacccactacagccagaatgcgctttgaattcaggttctgacatctgggactgcctcccacgtacacacaccactaccttgtactgaatgcctgaagggttctgcccccacctccactcccccaaatatttgctgtggacctgagaaagctgacttcatggaagcttcattccattgttctaaggacttttcatacattaacaaatgtcttctctctatggggaaaaccacagagaaatcaagacagagtggggttaagtaactcacctgaggaggaacagtaagtggcagagccaggattcaaaccaacatggttttgcacagttttgacatcatttgcaacacaaatattgtcacagatacctttttgagcatctactgtgctaaccgccaggaaggaaaagaacatggggccgggagagctcttgacaggggacagggctggccatggaggtctgtgtcttggtggaagatgctatggttctctttttttttttttttttttgagatggagtcttgctctgtcacccaggctggagtgcagtagtgcaatcttagctcacagcaacctccacctcccgggttcaagcgattctcctgcctcagcctcccaaatatctgggattataggcacacaccaccacgcccagctaatttttgtatttttagtagagatggggtttcaccatgtgggccaggctggtctcgatctcctgaccttgttgtgatccacccgcctcggtctcccaaagtgctgggattacaggcatgagccaccacactgggcaactatggttctcttttaactccttgtgctgaaattattgcagaagcccaggccagttcatccccagaaagtgaggcataaacaggcagagctctacagaaacagagaatccacgactggtttgatggaggctgcctcactacctacagaatgggctctgggtggattgttctatctggggagccagcccacccaccagtctcagcccttggcgactctttcctgctgtcacagcagctggacattcagaaaccgaaacatgacagccttccctccctgttcctgcccagtggagtggaaacccctcgggacccacataccgagcgtgcacagcagcacagagttgcacagttaacacagcgcttcttctccagccctccggatgcaagctgacagattggcagctggctgacttccaaggtccagtgagttcttggcagtcgctttctgacctggacgagtggctgccacctcctggaacatcaggctgcccccttggggagagggtgacggtctctctggaaagactgtgagctttgaggtggtcatcaaaagccattcttggaaacattctttgagctgtaccgtgcaattcggtcaccaattgcacgtatttggatattaatatccgtatgtggatattaaattggttttgggttttgttttgttttgattgtggcaaaatatacacaacaatcctcctgcctcagcctcccaagtagctacaggcatgcaccaccatacccagctaatttttggattttttaaatttgtttgtttgtttttgttttttgagatggagtgtagcactgttgcctgggctggagtgcagtggcgcgatctcagctcactgccacctccgcctcctggattcaagtgattctcttgcctcagcctcctgagtagctgggattacaggcgcccgccaacacgcccagctaattttttgtatttttagtagagatgaggttttaccatgtcggccaggcttgtctcgaactcctgaccttgtgatccacccgcctcagcctcccaaagtgctgggattacaggtgtgagccaccgcgcccggccgatttttgtagttttagtagagacagggtttcaccatgttggctaggctggtcccgaattcctgatctcaggtgatccaccgcctcggcctcccgaagtgctaggattacaggcatgagccaccgcacacagcctaaatgctgtgcctcacgcctgtaatcccaacactttggtaagctgaggccagaggattgcttgagcccaggagtttgagaccagcctgggcaacataggaagaccccatctctataaaaaataaaaataaattagccaggcgtggtggtgcaggcctgtggtcccagctactcgggaggatgaggcaggaggatcgcttgagcccaagaggtcaaggctgcagtgagctgtgattgtgccactgcactccagcatgggtgaaagagcaagaccttgtctcaaaaaaaattaagcgaaatttaaaattctgtttctcactcacacaggctgcacttcaagtgcttaatcatcccttgtgggtggtggctatcatattggacagcatggatagagaatatttttatcagcgtaggaagcttcatcagagaggaccgctcagaggcctgtggggaccagcacagtgcagtagaagacacaggccagctggtgagagactggtcttctgatcccagatctgtccctcacttgctaggtgaccttggacagctccctcagtccctctggagttttctcttcattgttaaatcaggaaattggcctcagtgaattctgaggccccatctacttttttttttttttttttttttttttttttaattgagacagagtctcgctctgttgaccaggctggagtgcagtggcatgatcttggctcactgtaacctccgcctcccaggttcaagcaattctctgcctcatcctccccagtagctgggactacaggcgtgcaccaccatgcctgggtaatttttgtgttttcagtagagaccgggttttgccatgttggccaggctggtctcaaactcccaaccttgagtgatcctcccgcctcggcctcccaaagtgctgggattacaggtgtgagccaccacgcctggcctcatctagttctaaatgttatgacccactcagctctgaagacaagggaggaacatcctctcagtctagctctgacatgcagaagcctctcaccctgtcccccaggtcataaaggcaggcgtgttgtgaagagcacagaatgggctgagaaaaatatgcagggattgcgtctatctcccttccttccgcacgtttccttgtcggcaccacctgcctctattccgcgccgcacacacacccgccttctctctgtctcggaggaagacaggatcttccatcccccaaatcctgccctgattcctactctgaagcctctgccctgactcctttaagctccctgggaatacagcccatctcctatgccctcctcatcccagtagttcctaccttccccaaaatcgctttgggaaagtcccccaatgagtaaccagctgtcctacatgggcatctcagaacttctcttctgttgttgttgttgtttgttttgcttttgttttgagacaggatctctctttttcacccaggctcgagtgcagaggtgtgatctcagctcactgtagccttgacctcccaggctcaggcgatcctcccccctcagcctctggaatagctgggactacaggcacacgccaccacacccgggcaaattttttttaggacttttggtagaaatggagtttcgccgtgttgcccaggctggtctctaactcctgggctcaagcgatccgcccactttggtctctcaaagtgctgggactacagacatgagccaccacacccggcagagcttctatttcttgagtgtgttctcagccatgctaagacattttctcttctcagcctgatgatgcttttggcttgtgtttctttgtttttaattaccccttcccagtcgctgtcatgggatcatgagggtcttctgtccatctagatgacacctttcttgtgccacgtgtctccaacattccctggtttttaaacccttattgctttcaagatactatccaagctccttaatgtggcacattgtccttcgctgctatctgcctgctttttttttgagacagagcctcgctctattgcctaggctggagtgcagtggcgcaatcacagcttactctgcagcctcgacttcttgggctcaagcaatcctcctgcctcagccttctgagtagctgggaccacaggcatgcaccatcatgcttggctaatttatttttatttatttttatagagaaggagtctccctatgttgcccaggctggtctcaaactcccggactcaaagttcattgcagtttcaattttttccttggctcaaggatcctcccacttcagcctcctgagtagctgggactacagacgggcaccaacacacctggctaatttttgtattttttgtagagatggggtcccactatgttgcccaggcttctatctgcttttatctcaccttccactcttccatccttcctttcttttcttttatttcctttcccttcccttgccttccttttctttctttctttctttctttctttctttctttctttctttctttctttttctttctttctttcttgacagagtctggctctgtcacccagactgaagtgcaatggcaagatcttagctcactgcaacctccacctcctgggttcaagcaattctcctgtctcagcctcccgagtagctgagattacaggtacctggcaccacacccggcaattttttttttttttttagtagagacggggtttcgctatgttggccgggctggtcttgaactcctgacctcaggtgatcctcccacctcagcctcccaaagtgttgggattaacaggtgtgagccactgtgcctggccttttttttttttttttttttttttaagacaggaccttgctctgtcactcaggccagagtgcagtggcactataatcactttctgcagccgtgacctcctgggctcaagggatcctcttgccttggcctccctagtagctgggactacaggcatgtgccaccacactggctaatttttaaaactttttgtaggccgggcacggtggctcacacctgtaatcccagcactttgggaggccaaggcgggcggatcacgaggtcaggagattgagaccatcctggctaacacagtgaaaccccatctctactgaaaatacaaaaaattagccaggtatggtggcgggcgcctgtagtcccagctactcgggaggctgaggcaggagaatggtgtgaacctgggaggcggagcttgcagtgagctgagatcacgccactgcactccagcctgggcgacagagcgcgagacaccatctaaaaaaaaaacaaaaaaaaaaaacaaaaaactttttgtagagatggattcttgctaggttgcccaggctggtctcaagcttctaggctcaagcagtcctcttgcctgtgcctcccaaagccttgggattacaggcgtgagcccccacacctggtcctaacccactttctgaacttccaaccacaccattttgtcctaatatttaagtcacaccataacatgtcccacttcagaaatgcctaccaaagtagtcttcaaatctttttaaatcagtggaccctttctaccaaacaaatgttattttttaaatatttattttagagtaatttagacttttagaaaggttgtagctgggcgcagtggctaacgcctgtaatcccagcactttgggaggccgagacaggtagatcacctgaggttgggcgtttgagaccagcctgggcaacatggtgaaaccccgtctctactgaaaatacgaaattagtcaggtatggtggcacgcgcctgtagtctcagctactcgggaggctgaggcaggagaattgcttgaacccaggaggcggaggttgcagtgagctgagatcgcgccactgcactccagcctgggtgacagagtgagactccatctcaaaaaaaaaaaagaaaagaaaaaaaagaaaggttataaatatattataaagagttcccacatacccttcacccagtttctcctgttgtttgtatcttatattatcaccatatgcttgtcaatgctaaggaattgctgggtgcagagtggcacatggctgcagtcccagatactcaggaggccaaggcaggaggatatcgcttgagcccaggagttcaagtctagcctgggcaacacagtgagacctcttttctgcaaaagaaaacaaataaaacatctaaaaaagaatacactggaggcggcgtggaaacaaggatctcatttgggagttgtctgcaatgttctgagcaagcagtaacggaggcctcaagtcagggctgtggtcatggaggtggggaggggtggttggtttcactatctgtgttgacttaattttagatttgcagactcaactgagtatgaactttaagagaaagagagaggccaggcacggtgggtcacacctgtaatcccagcactttaggaggccaagtggggaaggccgcttgagcccaggagtttgacaccagcctgggcaacatagtgagacccctgtctctacaaaaaaaaatttttaaattagccaggcagggtgatgtgtccctgtaatcccagctactcaggacagtgaagcaggaggatcatttgagcccagaaagttgaggctgtagtgagctgtagttgcaccattgtgcttcagcctgggagacaaagtgagaccctgtctcaaaaaggagaatggggagagagagagagagagagaaggagaaagagagagaaagagagagagggaagtcaaggagaaccccacattttttgacatggtgtattagtctcttctcacactgctaataaagacatacctgagactgggtaatttataaaggaaagaggtttaatgcactcacagttccacatggctggggaggcctcacaaccatggcagaaggcaaaggagaagtaaaggcatgtcttacatggcagcaggcaagagagcttgtgccatttataaaaccatcagatctcatgagacttattcactaccacaagaacagtatgggggaaactgcccccatgattcagttatctccacctggcgccgcccttgacacgtggggattattacaattcaagttgagatttgggtgggaacacagccaaaccctatcacatgggcaagtgaaaggatgggtttgccatcaaataaaatggggaaggagactgactaggtgggcagattaggaactcagctttctatgaagtgcctactgatggatagagatattgtgttggccatctattaggttggtgcaaaagtaattgcggttttgccattaaaagtaatggcaaaggaaataacctttgcaccagcctaataggaattggagtctaaaattcaaaaaaggtaagtcagagctggagatccaaaggcaggagtcagcctcctgtggaggctatttaaggaactgaataagggcatagatgcaggagagcacccaggactgagcccagggcttactctccatcattaaagaggttggggaagatgaggaggagccagcagagaagactgaattggagcaaatcagaagaatgtgggtgctggctgtcatgcaaggaaagtgctaagccatttcaagtatgagggaatgatcaatgatgtccactgatgctgatgtgttgactcaaatgaaaaatgagaatcaaccattggatgtagtggcatggagatctttcgtgacctgagccagagctgcttaggtgaagaggtgaaggcaagaggctactggaaggattactactagctcttttaaagagttctgctgtgaagggtagaggaagagagatggggcatgtgttagctggtgggggaagtggatttcagaggtttgtttcccttaaaaaaaaaaaaaaaaagaaaaaagaataaagaaaaaaaaaaggccaggcacaatgactcacacctgtaatcccagcattttgggaggctgagacctcgggaatttgagactagcctggacaacatagtgagaccccatctctacaaaaaaaatttttttttaattagctgggcatggtggtgcatgcctgtggtcctagctacttgggaggctgaggtgagaggatctcttgagcctgggaggtcgaggctgcagtgagctatgatcacaccactgcactccaggctggacaacagagcaagaccctgtctcaaaaaaaaaagatgggagacctaacagcagattttatgctgataggaataacctattaggggagaaaaacatgaggatgctggaggaagaagagtgtcaggaggacatctcttggtggacgagaggggatggcatttggtgtacaggtggaaggtttcactttagatgacagcacacacagttatctatagaaacaggagaaaatgcactatatgggcatacatgctgggaggtagagagtaaataatagtggtggttgcttgtggaaattctcttctaatgtttttatatttttatggtttatcaaggacaatttatatttttacagtttactgcaaacaacaagttctaatttattcaataattatttgtgggtagaccgagtgcagtggtgcatgcctgtaatcctagcactttgggaagccaaggtgggaggattgcttgaactcctgattcacttctgagcttgaatcaggagttcgagatcagcctaagcaacatggcaaaacactgtctctacacaaaatacaaaaactagccaggtatagtggcatgcacgtagtcccagctattcgggaggctaaaacgggaggatcatttgagccctgaaggtggaggttgcagtgagccaagagcgagccactgcactccagcctgggtgatagaataagaccctgcctcaaaaagaaattcttattcttcttcttcttattattatttgaggagacatttactttgtaccaggcgctgtgctagatgctggagatacagacatcaacaatgacaaggctaagtgcctggcgtatttgtactttgagtctaataaaagacatcacacagacacacaacacacacacacacacacacaggattgtcaaaggatcaaccatttcacatgtcaagatcaggaatgatattggtctactactgccttaccatatctcctaccatgacctcatcttcctcttgccagattttaagtctttatacctcaactcccagaactctcttcgcctcacaccctatcacaatgtcatccgtaccccacggccaatactccatcattcgggaaagcaaagttccaaagcgtcaagattgtatcaatggacctgtctctatggcaacagtcctgaatgagccaagcaaggtaaccctggagatggcgtgaatgagaaagtggcctgttgccacggagacgtgctgaatgggaaggcccccacgagccaggctatgtcacgaagccgaaacagtcagcatgaagtcggtatgtctattttcaactcggaattacaaaaatacattttaatagagctcatgacccatctccttcctcgtccctgcctcccaccccactcttcagccttcatcctacaacacaatcgagcctcaccaggaacccttcaaacccctcaaggacaccttactgttccttcagtacacagtccccttcctgggctgaggtggtattcctttgaccaactactgtctcccctttgggaccaacagtattctcaaaagccatgagcttatgggaagaacattaactacattctttggggcaagaacagttgctcacctgtgaaccagctcagcttgcatctgtgagaatgattgcaatgggtagaccagttctccatcaaagaatggccctagcaccccacacacagtggtataatctgatcatgctggtgtattgaacatataatgttagtgccacatgaaaggaatttgtaaaaggacttagtgcctagaaaggtacctttgaagatcttggaatctctgaaacttacccaggttccttataccctgctcaaagtattcctccatttatttcttcattcattagttcttttgtttcaccacatatatatttttgaaacggggtctcactctgttgcccaggctagagtgcagtggcaagatcgtggctcactgcagcctcaacctccccatctcaagcagtcctcccacctcagcttcctgagtagctgggacaccacaggtacaagccaccacgccaggctaattcttgtaatttttgtagagacggggttttgccatgttgcccagtgtattcgtttgttctcacattgctataaagaactacctgagactgagtagtttataaagaaaagaggtttaattgactcacggctccacaggctgtgcggaaggcatggctgaggaggccacaggaaacttgcaatcatggcggaaaatgaaggggaaacaagcacatcttcacatggtggcaggagagagagagtgagggggggagtgctacaaaaccaggtctcacgagaactcactcactgtcatgagaaaagcaagggggaaatctgctcccaggatccaatcacctcctaccaggtccctcccccaacattggggattacaattcaacatgagatctgggtggggacacagagccaaaccatatcacccaggctggtctctaactcctgagctcaagcaatctgcctgccttggcctcccaaagtgctaggattacagacgtgaaccatatttattaagcattgttacagcaaagagaagcattgttgcagcataacaattggaagactccattgatggacgtctccatcaacaagaactgtcggataaactatggtacacccatcccttagcgtgttatgaagtcattacaaaaagaagaagcagatctctgagtgtcaataagagctagtacttatagggtgtctactgtatacaagtgctgttagaaagtgagtattaactcatttaattcttgtaacaagcctgtgaggtggattctttcatatccccattttacagagaaggaaataggaatctctatatccaagatatgttatcaggtgacaaaagcagtttttgaatggtgccgccattttctcgtaagagcaaatctggaagattccatgagaaattaataattgtgtttgcctctgtagcggcaccctgaaagatttggaagtaggtgtggaaaggaaacttactttcttgtgtctttctgaattttgtactgtctacgcgttttgtctttcacaaaaccaaacagaaaatgaccatttggtgcattttgtgtgtcaggcattcttctagtctagagaagcacaggagagcaaaatattttactgacgagaaaaatgaggcatggagaagttaagtgacttgcccaggtagcagagctgggattccacatcatagggtttatacaggaaacaggtaaacagagctgtgcttgtgtgtgggtatgtgtgtacacatgcatacatgtgtgcatgtgtgtgtgtgtttgtgtgtgtgtgaatgtgcttgtgtgttgggagagggaaatggcaagagaagaacctacagaaggtcagcaggaaccaacccatgttttgaggagtttggactttatcctgaaggcacaagggagccatggaaggatttagacaaggggtggttgtgcttagctttttatttagaaggatgactctggctgaagggtgatggcccagaatacaggtatatgtgaaggactcctcctgccctagtaggaggatgcccacccaccctctctgcccagtgcagtatcaaagggcaaattgggtacagagaattctcaccaagctgggtagaatccactctgatgctggggagtggacactgaatgcaccagcctctcctcctgctcaatccctgaattgaagctgttccactaatgttagggatcagattcccttcatatatatatatatatatatatatatatatatatatatatatatataattttttttttgagacagagtctccctctgtcacccaggctgaagcccattgtcgcgatcttggctcactgcaacctccacctcccaggttcaagcaactcttgttcctcagactcccaagtagctgcgattacaggcacccgccaccacacctggctaattctatatttttagtagagacagggattcacctatgttggccaggctggtcttgagctcctgggctcaagtgatcagtctgcctcagcctcccaaagtgctagtattacaggcatgagccaccatgcccgtcctttttatattacctttttttatagagatgtggtttcactatgttgaccaggcaggtcttaaactcctggcctcaagcgatcctccctcctcagcctcccaaaatgctaggattacaggtgtgagccactgcatctgtccagactctgttctccataaagctggcatatggaaagagggaagaccatccaggcaatatcgaagtcccattggtgctgatgtggctgctgagaccacatgaatggatgcattctgactctgccacctctcagctatgtgaccctgggccagtcagcaagtccctctataactcagttttctcatctgtaaaatggcgtcaacagtagccaaccccagcaaatactgtgaaatatacagaacatcattataatggtgaggatgatagagatgctatgttatcagaatacctgggcttgaaccagctccccttcttgcaagctgtgtgacttggagctgatgcccaaacctctgtgggcctcatttgtttcatctgttcaatggggataataacactcttacttcatacagttatggaggatttattgaaataattgacatacagctcttagaacagtatccggctccttgtaagcgctcaagaaatattacagactgttgataataatgcaatactactaccaataatatggccaggagcaatggctcacacctgtaatcccagcactttaggaggcagaagcaggctgattgcttgagcacgggagttcgaggccagcctgggtaacatagggagactctgtctttacaaaaaataaaaataaaaatacaaataattagccaggtatggtggtgcatacctgtagttccagctacttgggaggctgaggtgggaggattgcttgagcccaggaagttgaggctacagtgagctgtgatcacaccactgcactccagccagggcaacagagtgagaccctatctcaaaaataataataatggccgggcgcgctggctcatacctgtaatcccagcactttgggaggccaaggcgggcagatcacttgaggtcaggagtttgagaccagcctggccaacatggtgaaaccccatctactaaaaacacaaaaattagccgggtgtggtggcggggtgcctgtaatcccagccactcaggaggctgaggcaggagaatcgcttgaacccgggaggtggaagttgcagtgagccgagatcacaccactgcactccagcctaggtgacacagtgagactccatctcaaataataatatgagtaataataataatatcatttttatcatcattcttactaacagtctctcactccttgccctgcagttttgcctgttttcttggaataacactcttccacacctttcccctcagggatggttcacgtttagcatcatgacccacccctggggattagttagctcatttctggaaagcactttggagctgtaggtgctttgcaggctggaaacatcacgggacttgtaccatatttaagcaatgccagattattctgcctggcagggggaggacacagaggatacggccctggtatcttttctccctgcctacctcagctttgctctgaaccattttctgtcctgttcagggcagcctgggccacttgccacttccagctttctcgggagaggatgccttcctgatggcacgcctcttaacacacacctggtgctgttgttgaaaaagcaacaattgactccagcgccagcactgagaggcttgtccttaaaattagcaggagctgttggaaggtcgctgttagctcttttgactggaacacactgttccccaggtggcatgaggctgaatacagtgcagggattggctctgctctcaggtggcctgctccacgctcctgagctccgggtggaagctgtgaccattatttccttaacagaaacatatatagcagcattaactatgaaccttattactgtgtgtgtgtgtgtgtatatgtgtatatatatatatgcacatatgtgcatatgtgtgcctatgaacctgttctgagcactttacaaatgtcaatgtattttatcctcccaacaacccattttataaataagacttgaggcacagagaggttacgttactgccccaagatcacacagctggagagtggtgaggccaagatttgaacatatgtaccattgtaccatatgtaccaactttttttttctttttgggatgcattcttgctctgtcacccaggctggagagcagtggcatgaccacggctcattacaacctcaacctccaggttcaagctatcctcccacctcagcctctcaagtagctaggaccacaggtgcataccaccatgcccagctaatttaaagtttttttttgtttgtttgtttgtttgtttgcagagatggggtctccttatattacccaggctggtctagaactcctaggttcaagcaatccccccacctcggccttccaacatgctgggattacaggcatgagccactgcacccaggtcctccctccttataaaggtcgccaagcacaatcttgtgagcctggccctatccacacccatacgcaacatggtgtgtatttttcaaacaaaaactgaatgaacacctctggtttgggttcccctcacacttgtcccgggtttgttgactctgtgttgtgggcctagacaaagcagtgtctggagctcctagacccagggaccagacagtctgggttcaaatcctggctcttccacttctgcctgagtgctctctctgaacctgtctttctttatctataaaatggagataatttttttaaactcatcacttggtcaaactgctttgagcatgcaaatgagttcatatgtataaacctcttagaatgtcccaggcaaagaacaacacttcactcagatcaacatttatttagcatctactgtgtacccatgactattctaggtgatgaggagaccctctggttcttatgaggtagtgaggtgggggagggtgagaaccctaaacattaacgatggtgtgttcgcaggtgggaaaatcagtaaagtcgggtaaagggaatttgggagtgctgtgctcaagtcctggccctgccactttctggggtgcaagatacagcattgaatagggtggtcagggtaggccttattgggaaagtgatatttgagcagacgatctagatgtcggcacatattgctactgtttgatggtactaatatgagtttgagtttcacttgcaagtatatatatatatatatatatatatatatatatatatatatatgtgtgtgtgtgtgtgtatatatatatgtgtatatatatgtatatatatgtgtgtatatatgtatatatatatgtgtgtatatatgtatatatatgtatatatatgtatatatatgtgtgtatatatatgtgtatatatatgtatatatatatatgaaatttggtccatttatttatgctgatcaattaattgatgttgaaattataattgaatgttttattaataaacagatacccacatactattttttcagaaattgttaggttttggggttttctttagattttgattatttttatttgcttaattttcttttttcttttttttaattttatttttccataagttattggggtacaggtggtatttggttgcatgagtaagttcttcagtggagatttgtgagaacctggtgcacccatcacccgggcagtatacactgcaccatatttgttgtctgttatccagtgctcacctcctactcttccccccaagtctctaaagtccattgtaccattattttactcacccacattctttggcctgagatgctgagtggtcatgactcccagatcccttcttgtttctgtatcaaagatctttactaagatcctggcctagggaacctattccctttcctcatccccaatgggagaaggggcttcttccccagcttatttgccaactcataggaaaggtatgaaggagaggactgtagttgtcttgaagctggtcagatgttgaagagatgataatatttgctgatcaagagagacaaagcaatgctggaagaagaggctgtgttagttaacaccagctgcaataaccaataaaaccaaaaatctctggcttaagagtatgcatgagtgagaaatcaacttctaaagtacaactggtggccggatgtggtggcttatgcctgtaattctagcactttgggaggctgtggtgggagggtcgcttgaccccagtagtttaacgccaacctgggcaacacagtgagacaccatctctactaaaaataaaaaataataaagtgaaactggtgaggggtgcaatgaggtggagtggtgggtgactcaaatatggctcgactccatgcagtcactcagggatccaggctgttggaggctctccctgcttaaacatgtggcttccaaggttgttctaagagcctacattgagacagcagctggggaaaagggaaagtggagtgggaggtacttatgagggttcctggaagtggtgaacaacacttctgcctgcattctattgggtggaatttagtcatgtggcccaggctagctgcatgggaggctgggaaatgtagtctctgattaggctgccatttcccagtcccacttgtgaatctttagtgggaagctcaccatgtttgcaccagggattcagtctacctcccactcatgcctcaactatgtatcaggcactgtcgtaagtactttacatatcagcctacctaatgcaaacaactactcagtgggtgctttattggtcacatgtattagtgagaacatggaaacccagagccgttaaatatcttgcccaaggtcacacagctaggaagtggcagagttggaatttgaatccaggaaatctggctgcagagccccacgcttagtataaattcattgtagtttagaaagaggcagaaggaccctaaaattggcataatccattttttggtccctaaggaactgactgaattgactacttgtaaaagtgagtcctggacaggcaacagtggctcaggtctgtaattccaggactttgggaggctgaggcgggcagatcacctgaggtcaggatttcaagaccagcctggccaacatggcaaaaccctgtctctaaaaaaatagaaaaattagctgggtgtggcggtgggtgcctgtaattccagctactcaggaggctgaggcaggagaatcgtttgaacctgggaggtggaggttgcagtgagcaaagatcacgccactttactccaacttgaatgacagagcaagactctgcctcaggaccgccatggccccctgggttctaggtcagagtttctccgccacagcactgatgactttgggggctgcattattagctccaaaatgggagctatcctgtgcactgcctcaacttacttgatgccagtagcgcccgcgccccagttgtgagaaccaaaaatgtctccacacattgccaaatgtcccctgggaggtgaaatcacccctggttgagagtcactgttctagattgttaaatattatcttacactctagcacaagtccaaggcaaactgacttagaaattaccaaccttgcaaaaaatagaagatttcttaaagtcagtgagcatgatggtggcaagctgctgaaatcacacccccagacattagcagatgggatctggacagtattcatctagttaaaaattgacaaggactgggacactgcaggctcttcaaaagagaatcatttgaataacaaggggtcaagacaggggtaattggtgaaagcccctgctcataatttgaaaatataaataggcatcatgaaaattcatcctgcaaaagtcaaaagtcgaatgtgcagtgttatacatgatcagttgatttgggaggggaaattgcatgcacacacatgagagcttgcacacccacacacacacacctgttcaagtgtgtgtgccagtgctcagtgaggaccatctccccaacctgtctgatcatcttgctttggggtgaccctatgggtgaggcagaaattcttggatcatagttttctaatgaatattataattgttaacttctgatgggtgctgactttttcatctttgcaacactgcgtaggtatttttactctccccattttacagatgagacaactgaggctcagaaagattgattagctctacacgaagccaggatccaggcttagcctggctccaggaatcatgttttgagttacgtagcttccctgattctgagggacctccccacttctgaaatcttctactgttactccccatggccctttcctattgaccggaggcaccccagctcctcactcgtcccttatcttatgaaacatgaccatgatgtctgaattcaaaggagagcctgggctttgtggggaaaacgaagcagaaaaagaaaggtggaggttggtggttgtttttggcatggtgaggagcctgtcgttgcttgaggaaagcaagaaaggagattgctggggcttggatccatctctgggtgcctgtgggtctgtctgtaaaaatgagaactggtcgtgctcattagaggatttgaccgttaggccttgggatagcgatttgggaacttttttctgctaagacaaagaataatatggttcaggttcattttgctcctgctttcccaagccctacatctcttctgggcttttttttttttccttttctctccttcttcttcttcttcttcttcttcttctcatttttggatctggacttctgctgactcatctctctgagcaaggaaggagggaggaagtcagaattgctcattaaccgttttctttagtgactcagctgtgattcacattttaattaatggaggagaaaaacctgatcagtcctaaggcatctgcccaatcacgcataactccaggctggtgataataataatacttgaaaaaagtggggtgtcctgaattaaactatggctcattccccacattagtcttgaggactccaccaggccctctaagttccaggtctcaatggggctccctgaaccagagcagctagtccaagccccgagcagcatttctgcagagttagtctgaggtcaggacaagaaacagaggctcaagccctcctgggatcgcaggaggatcatgggaatgtaatattgtttcctgagctggtctttggctataatcccaggctcaagcctggcctccctcccctcggggcctgaaatttgtcagagcctattgcaggggcagcttctgtgctttttgtttgcccagagaatgagaaaagtccagataatcatgaccgctacttcctgagcacttactatgcatcaggtggtgtgctcagcacttctcatgaatgatcacgttgaatcctcactctgtccacaaaaagaaagagcttttatataattctccaacctccctatgaggaaactgaggcttggcaattgcccaatgtagacaattagtaaataatcaggcaggatataaacccaaccctttcccacctgggagccagagcttgcatctactatacttctctgctttccagtcagctgcaaagaaaaattggaagctgatagctcattcaacaaacacttattgaacccttccacctgctcagccctgttctagacaccagagatccatcagtgaaccaaagaggcaaatccatggtctcatgaaactgacaatttacctgcccaagtgtattagttactgtttataagttcctattaagtgtattagatatgcttgcagctgtaacaaagaatcccaacatgcataagggctcaaaacaataaaaatttcgttcttgcacagataaagttcaaaaggtgtattctttttttttttttcttttgcgacggagttttgctcttatcctccaggcatgagtgcaatggcccagtctcggctcactgcaacctccacctcctgggttcaagcattctcctgactcagcctccccagtagctggaattacaggtgcccgccaccacacctggctaattttttgtatttttagtataggtggggtttcaccatgttggtcaggctggtcttaaactcctgacctcaggtgacccacctgcctcggcctcccaaagtgctgggattacagccgtgagccaccgtgcctggccaaaaaaaaaatgtattcttaaacagcaggcacctctcctctaagcagtaagtcaggggcccaggcttgttccatattgtagctcctcatcttcaacccatggcttccaaagtctccatgcttcttgatatcaagccacagaagggaaaagagcatgagaagggcacaggagaaatgtttctgggacagacccagaagtagtccatatgacttccatctacctcccactggctagagcttacatggcggcacccacttgcagagctgggaaatggagtctaactgagcatccaggaaggagagacagacatgagtctttgcgtgggtcctcactgagaatcaagctccacattttgatcgatgtcaccagagcgtacatggcggcgcccacttgcagagctgggaaacggagtctaactgagcatccaggaaggagagacagacatcagtctctgcgtgggtcctcactgagaatcaagcttcacattttgatctgtgtcacctccttgcaagccctaccttaggacaattttaagggacattcctatcttcttccacccttaggacagttttaagggacactcctgagttcttccacccacctcctctgtttcttgggcttccagctctcaggatttgcctttgccttacaatggggtgaagcaagaatctggaagaatgtctctccccacaatttgaagtcttatttgaaaaaaagcagtagagcatccctccctcttgaggtagggaaatctagaatcaaatcctgcttctccagactttgacctcagaaactggggggacttcaaggtcttcaggtgggcagctttcatgaaccattcattcctcccacctcataccaatcagggtcctaacaggaaaaagaattaacttctagatggttcaaaagaagaccatgccatgaagagactccttaaagagataggaacaggtgagagaaatagataacggctgtttgaggtcctcagagagaagccatcgcgagccctacatttcctggaacccagtggaggcagagctgtgcagaagggactactgtcagaaccagggagggagcagggaagcaatattccaatctctttccctcccctcatcttctgccagcgcttcccctcagccaaaccaaaccggaaacggagcaaagcattctgggagttgtagtcttcaagggtccgcctcgagggcacagagcccgctggagcattgacctagagggcacacagggaatgactagtttgcaccatcatgtgacggactgcacgccctcgattatgtaatccactctataattcaactgcagagctgcatggtacagcaggatagccactagccacacgaggctatttaaatataaatgtacattcattaaaatttaaccaaatgaaaattttagccactgagccccatttcaaatgctcattagccacacgtggctcttggctaccatattggacagatcagaatagaacatttccatcatcccagaaagttctaggggccggcgcagctgtggtgtaacctgagcccatgcatgttatggaatggagaagagagaaaacagcacaagaggcagttttgaagggagacagagagctgtggatcagtagggaggagactctctaggcaaaggagcagttgagaagcaagaaagttgagtgagctgctttgctgcgatggaggcttccctcacggggaagagtagagtcagaaagctttagttcaagttcagctctgaaatgaaccaatgagtgttctgacaagacacctggccttccggaaccttggttttgtagtggccaagggcttgaccctctgaaggttcactgaaaaaaatcaactcacaaggcatattaattggagaaaaggcaggcagatttatttaatgtgtttgcacgagagccttcagaatgaagacccaaagctgcaggggaaattgtccgttttttaagcttaggttcaacaaagtatggacagcggtgtagaaatatgattgaacaaaaagtgtacaatgtaaatgctaatagactgagtggggaaacccaaaaagggctgtcttgattctccttggtctctctgagcatgcatttcttccgggtatgggacaagaccctctctggaatggagggggggctctcttggttctccttggtctctctcagcatgcattccttccgggtatggggcaggaccctctctggaataagggggctgtcttgattcttcttggtctctcagagcatgcattccttctgggtatggggcaggaccctctctggaatgggatccttataacctacggtcaaataacgtaagttagataatttcttttttttttttttcttttttttgagacagagtctgattctgttgcccaggctagagtacagtggcacaatctcggctcactgcagcctctgccttctgggttcaaatgattctcctgcctcagcctcccaagtagctgggactacaggtaagcaccaccatgcccagctaatttttgtattttttagtagagacagggtttcaccatgttggccaggctggtctcaaactgctgacctcaagtgatccaccacctgggcctcccaaagtcctgggatttgtaatcccagcatgagccactgtgcccagccagatcatttctttttctttttctttttcttttctttttttttttttttttgagatggagtctcactctgttgcccaggctggagtgctgtggtgcaaactcagctcactgcagcctctgcctcctgggttcaagcaattctcctgcctcagccttccaagtagctgggactagaggtgcgcgccaccatgcccagctaatttttgtatttttagtagagacagtgttttgccatgttggccaggctggtcttaaactcctgacctcaagtgatccacccacgtcggcctcccaaagtcccgggatttgtaatcccagcatgagctaccacagctggccagataatttttttataactagtttttacaaagaaaggtggagggaaagttagagtaacatttttaggtgttagggctgactttggggaaaagaggtctggtttctacgacccgccttagggaagagggattctagtttttgtggctagccccaggggagaatgggactaagagatagaagggcaggagaaggtcagagaaaaacttttgcttctgtggctgcttcggagaacttcattttggggtattgttttctgagccccaacagtttgcttatcagtgaagtgggtataggcgcccacctcccacagtgacgatgctgtgaacagggctttggaagagtagaactatgaaatatttgttgttgccttgtggggaaatggtcgttaaagccaaaattgttcaagagaagaagcaggaagagttcctttctttcctgcaggtatcctcttaagctgagtcttcagaatcccctgacaacgtttaatcaacactttattaaattcaccccaaccctgcttcaaaccttcacctggtcctcgagatcttccaactgtttcttgatgaagttagcaggcaattgtatggcgggatcatcatctcatgttttgttttgtttttttcctttttaccctctgactttgagaaatccttgtccttttacttttccaaacctgagagcattgcagagaagttagaattgagcaggacatgggcttaagacccagcccagccatgtgctagctgtgtgaactcgaagcagtgaccccacctctctgacctggaaagtagagggaatgataggacccaccaccgccacacttgtagggtcatcatggggattgaataaaataatgcataagacttggcccacagcaagcactcaagaaatgttagctacttcctaaatatatttttaaccttttattgaatataacatacatacagaaaagcacatgtatcatacaagtagagcttgagtgattttcaaaaactgagcccagtcatgtaaccagcgcctagttcaagaaacagaacatagccgagtgaggctgaggcaggagaatcacttgaatctgggaggcagaggttgcagtgagcagagatcatgctatcgctccccagcgtgggcaatgggggcggaggggaagagagagagagagagagagagagagaggaaggagggagggaaggaaggaaggaaggagggagggagggagggaagggaaggaaggggagagagagaaaaggaaagaaaagaggaagacagaaagagagagagaaaggtaaagaaagaaaaggaaagaaagagaaagaaagaaaagaggaagacagagaaagaaagagaaagctaaagaaagaaaaaaaggaaggaaggaaaatagggagggaagaggaggaggaagaagaagaagaagggggggagggagggaacagctgcagcttcgaggaaggaaggagggagggaaggaaggaaggaaaggaaggaaggaaaaaaaaacagcaccaacgtttagaaacccccttgtgcctctgaggtcaccagtaactccatcctgacttcaaacagtctagattagttttgcttgtttttgaactttaagcacatggggtcatacagcatgcatgcattgacttctttcccttgacgttgtatgtgtgagattcatctgtgctgttgctgttcatttgttctcatcgctgtgtgtgctgaaccacctgttcatttactctactaatggtgggcagtttggtgctttctactttggggctattccagagaaagctactttgaacacactcagatatgtctgtgggtgaccactcttcatatttctatgggagatattcctaggaccggaacatctgagtcagagggaggaattggtttagctttggtaggaactgcctaacaattggccgggcacagtggctcatgcctgtaatcccagcactttgggaggctgaggggggcaaatcacttgagctcaggagttcgagaccagcctggccaatgtggcaaaacccctggccaacatggcaaaaccccgtctccgcaaaaaaatacaaagattagccgagcatggtggcgtgtgcctgtaatctcagctactcaggaaactgaggcaggagaattgcttgaacctgggaggcagaggttgcagtgagcagagattgcactactgtactccagcctgggtggcagaatacatgaaactccatctcaaaaagaagaaaggaaggaaggaagggaaggaaggaaaggaaactgcccaacagttttcccaagtgtttgggatggaaggaaggaaggaaggaaggaaaagaaactgcctaacagttttcccaagtggttggaccagttaaaactcccaccacctgtgaatgagagtttgtttttattttgctcctggagtgcctctcctgtagcaggttcccactgaatgtctgggaattcaaatgtaatgcacttgttcatttcctcaagagcttcactccatcaattggattcatccattggctctcccatctccactgacactatgttctcacctctatttggaagacatcctgcctccacctgcccaagtcacattatcttctcattccagcctctcaaggagagttttctctttcaccacctcctctagccctggtgattggcaaggtctcgcaacagtacccttcaaaacactcatgactgtgaatgcactggccttcactaagtttcccattcttctctttctttcttttttcttttcttttctttttttttgaacagagtttcactcttgttgaccaggctcgagtgcagtggcacaaacacagctcactgtagcctcaacctcctgagctcaaggtatcgtcctgcctcagcctccttagtagctgggaccacagacatgcaacgttgtgcccagctgattttcttttttttctttttttttttttttttgagacatggtctcaccctgtcaaccaagtgcagtagcatgatcacagctcactgcagccttgacctcccgggctcatgcgattctcccacctcagcctcccgagtagctggggctacaggcacaagccaccatgcctggctaatttttgtacttcttgtagagaccaggtttcaccatgttgcccaggctggtcttgaactcttgggctcaagcagtcctcctgcctcagcctcccaaaatgctgggattacaggtgtgagccagcacgcccggccatggctaatttcttcatttttggtaaagacaggtctcactttgttgcctaggctggtcttgaactcctggactcaagcaatcctcctgtctcagcctcccaaagtgctaggactaccgatgtgagccaccgcacccggcaatttccccttcttgacttctccagagctctcatccctctcgagctcctgtctcttctagaatcacttacctcaccaccttatggggtttttgcctctgttcctactcctctttatttaagaaaacactgtactttaagagggcttcagaaaccacccgaaatagaaacatgtccttttgttcaatcctttactttaaaagacaaataaaatgaagaattgctctccatgtagaaggttaaggagcttgggaggaccttctgtgagtggggagaactttacattaaaggaaaaaaaatgctggagaatagctgtgaacccaggaagggagaaggacttcctccactgaacttgtaaagcacaaactctaaggcaaaaaaagacatgattacatgaaaactaagatatttgttcaaataaagatgcaattggggccaggtgcggtggctcacgcctgtaatcccagcactttgggaggccgaggcaggcgaatcacgaggtcaggagatcgagaccatcttggtcaacatggtgaaaccccatctctactaaaatacaaaaaattagccaggaatggtgtcacgtgcctgtaatcccagctacttgggaggcttaggcaggggaattgcttgaaccagggaggtggaggttgcagtgagctgaaatcacgccactgcactccagtctagcgacaaagcaagactccgtccaaaaaaaaaagatgcaatagcaggtggttcgggaaccaaaccttacatccagatgctggttgtcccatttcctgtgaatccttgggtgagttatcaacctctctgagcctcagtttcctcgtcaataaaatggagaaaatagtatctacctatggaattgttgtgagttttgaatgagttaatatttataaatcatttagaataggaattagcacatggtaaatagtggatagaatcataaaaaaaaaattgatcaggggttaacttctaactgctgtttgttatagaggtccctagcactgtgtggtcattttaaatttagatgatttagaattaaatgaaatttaaaactcagttcttcattcacactagccacattttaagtgctcaaaacccacaggtgactagtggctaccatatttggcagcacagattgagaacagatttatcatccagaaagttctgtcagacagtgttgatcaaggctacatgagggtctgggtgcagtggctcacacctgtaatcccagtgctttggaaggccaaggtgggaggatcactggaggccaggggtttgagaccagcctgggaaacagagagacctcatctctaccaacattttaagaattagccaggcaaagtgttgcatgcctgtagtcccagctactcaggaggctgagacaggattgcttgagcccaggaatttgaggctgcagtgaactatgagcgcaccgctgcactccagtctgggtgacagagtgagacctgtctctaaacataaaaaataaaaatgtaggtggggcatagtggctcccgcctgtaatcccagcactttgggaagccgagatgggcagattgtgaggtcaggagatcgagaccaccctggctaacatggtaaaaccgcgtccgtactaaaaataaaaaaaaattagccaggcatggtggcgcatgcctgtagtcccagctactcgagaggctgaggcaggagaattgcttgaacctgggaagcagaggttgcagtgagctgagattgcgccactgcactccggcctgggcgacagagcgagactctgtctcaaaataaataaataaataaataataataaagtaaaaataaaaatgcaaagactacctgagggaatgtctgcaagtcaaccagaataacacagcaaccccaataggaaaacaggccgaaaatgtgaacaggcggatcagggaagtgaagtctgaaaagctaatcagcctatgacatggtactcaaagtcatttgtaaccagaaagatggaaatgaaagcagtatctctgtacacctttaatattggggaaaaaatatgtgaataagccaagggtttccagcgatgcgggcacagaggaaagtcttgcaccactcaaaggggtgtggcccagggaggccactctggagacatatcggtagtactcagtccagtgaggtccagcaccatcagcgcttatgtccccaggcatccatcccagggacattcttaccaggtctgttaggggcaggtacgagaatgcttactccagcaccatctatataaggggagctgaaggccacctggtgtccctcctggagaccaggaggcggcatgtgacagcggcacccatggagcaccagaatgagtgagagctccagaccgcatatccgacagatactacgggatggggcttttagaaatatggttgttgccgggcacggtggctcatgcgtgtcatcccagcactctggcaggccaaggcgggtggatcacctgaggtcaggagttcgagaccagcctggccaacatggtgaaaccctgtctctattaaagatacaaaaattagctggacgtggtggcgggtgcctgtaatcccaactactcgggaggctgaggcaagagaatcgcttgaacccaggaggcagaggttgcagtgagccgacatcgtgccactgcactccagcctgggtgacaagagcaaaactctgtctcaaaaaatttaaaaaacaaaaaataaaaatatggttctgggtgaaaacaggaaacaacagaatgtgtctaacttcatcctgcttatgtcagttaaaaatagacacactcaaaatatcgcacgtgtttttgcgagaatgcactcctataaggccaaattaaacattctctcagttgtctctgggagggagaagaatgaaagtagggtatagagagatataggggaattaatgcatgaatgaatgaaggtataaacaagagacaggcgtcatacagaccaaaggtaaagatatcccgtaacctgaggagagcaaagaacttgactctgcatttgaagattcagaaaatgaatttcagaaatagttttctcgccagggggtggctcacgcctgtaaccccaccactttgcgagggcgaggcaggtggatcacttaaggtcaggagttcgagaccagcctggccaacatgatgaaaccctgtctctactaaaaatacaaaaattagccaggcatggtggcatgtgcctgtaatcccagctactcaggaggctgaggcaggaaaatcacttgaacccgggaggcagaggttgcattgagctgagatcacaccattgcactccagcctgggtgacagagcaagactttgtctcaaaaaaaaaaaaaaaaaaaaaaaaaaaagaagaggaagaaatcgttttttcaagaaggggaaagctgggtgatttaagaatgaacttgaagaggatcactcagtcctcaacctaggagtggcaagaatatagactgtatgggaagtggttctgctccttggtacccatcttagaaatatttggcctgagtctgtaagaggcaggtactttatctaacctgaggttagggggccactacatccccatcccctcccctgctttctaaccatgctaacatcttctcactctcctgtctcctctccttctcactcccctaatctgcctattcacattttgggcctgttttcctattggggttgctgtgttattctcactgatttgcagacattcctctgtgtcatctttttaattttgttttaatttttagaggcaggatgtcattctgttgcactggctgtagtgacgtagctcactgcagcctcaaactcttgggctcaaactcctgtcctctgcctccacttctcaactggtaacctcacttctcttcatgaggtctctccagccccagggcctttgcacatgttcccctctcttctgagtggcatatggtagttgctcctctgtaaatatttattgacatcctgacttccaaccagcagagaattgacctccttcccatgctcaggctagtgaaggcatgagtttggctgaggtcccagtggggaaggtgagtggggtggcagagttaaccaggagcagcatggtagaatgggtaaaaccagacgtagcacgcaggcaccacatgttagctggacaagtagtttaaccccatgggtctcaatttccccatcaatgaaagggagaatagaacaagtccctggtaagcagcataaaatgagctctcagaatgtaaagtaacaagcacacaacctggaagagaatacatttagtgaatattggctcctttaatcagcaggttctgatatgacttagctacaattaagaaaataaaaatggaggccgggcgcagtggctcatgcctgtaatcccagcactttgggaggccaagacgggtggggtggatcacctgaggtcaggagtttgagaacaggctggccaacatggtgaaccccatctctactaaaaatacaaaaattagccaggcgtggtggcgcacgcctgtagtcccagctactcgggaggctgaggcaggagaaacatttgaacccaggaggtggaagttgcagtgagcccagattgcaccactgaactccagcctgggcgacagagtgagatttgtctcaaaaacaaaagaagtctggaggccaggaggttggttgcagggttggttccttggctcaacaatgtctccaaagagtccttccatctttccactctaacatcgtcactgtaaggactttttttaacatttaccactcacagccccaagacgactgcgtcagttctttctttttttccttcagacagagtcccgctctgtcgcccaggctggagtgcagtggcatgatctcggctcactgcaacctctgcctcctgggttcaagcgattctcctgtctcagcctcccgagtagctgggattacaggtgcctgccactgcatccggctaattttttgtattttttttagtagagatagggtttcaccatattggtcaggctggtctcaaactcctgacctcaggtgatgcacctgcctcggcctcccaaagggctgggattacaggcgtgagccactgtgcccggccgatgactgcctcagttctaaggtacttacccagccatccacgtagacagacacaaaagcatccggccaaagaagagggagaggaagggctgtctcttaccatgtgactcatctcacggggaaaaaatccttttccagaagcacccagcagatttttcacccagatcctgttaggcctacgaatgggtcatgtgacaagtgctcttattgcaaggaatcttgggaaaaagagactattaggcattttctgcctctttgatgggaggtgggctctgccagtaaggcgggtagtggtggtggctcttggatggacaactgtgtcttccattcttcttcttcttttttttttttttttaagagacaaggtctcactctgttgcccaggcagaaatgcagtggcacaatcacagctcactgctgcctcgacctgccaggctcaggtgatccgcccaccttagcctcacgagcagctggaggagtgtaccaccatggccggctaatttttatattttttgtagagatggggtctctttatgttgcccaggctggtcttgaactcctgagctcaaacaatcctcctgcctcagcctcccaaagtgctgggattacaggcataagccaccacgcctggactctcttctttaaatactgagccttccacctcttctagaatatactctgttaattatcaaccacacttttctacatttttgcttcattattcattcagtaaacatttattgagtgcctactgtatgccaggcacagctttaggtgctggagatgctatgaacaaaacagatgaaaatttctaaaaaataaaataaaaaataaaaataaattttgcaaagccaggcacagtggcttaggcctatagttccacctactcaggagtccaaggcagtaggatctcatgagactgggagtttgagtccagcctgggcagcatactaggactctgtctctaaaaaagaaaagaaggccgggcgcagtggctcacgcctgtaatcccagcactttgggaggccgaggcaggtgaatcgcaaggtcaggagtttgagatcagcctgaccaacatggtgaaaccccgtctctactaaaaatgtaaaaattagccaggcatggtggcaagtgcctgtaatcccagctacttgggaggctgaggcaggagaatcgcttgaacctgggaagcggaggatgcaataagccgagatcgtgccactgcactccagcctgggcaacagaatgagaccctgtctcaaaaaaaaaaaaaaaaagaaagaaagaatagaaaatatctgccctacggggatggacatgctagaacatcaaagtccaatggaactttctgcactgatgaagtatgtatgtatgcaccagccacatgtggcttgggagcacttaaaacgtgactggtacaagcgaatttttcatttaatttaaatgaatttaaatctgtatttaaatagccatgtgtggctagtggttactttattgggcggtgcagctctctaaaggccaagagatacatcatcaacttctctcccttgacccatattcagttctctcccaccctgaaaatctcctctcctacccaggctcacatttccagttcttctcctcttgttctccctcaaccatcagcccccgcaagactgacgtgaccctgatgccgtatgaaatgcattcttcatcctttactcttactcacctctgtgcggccctggagaccagtgacctctcctttctcaaaatactttatttctgtgtgtttttgttgttgctattgtttttggggggttttcttgagatggagtttcactctcatcacctaggctggagtgcagtggtgcgatctcagcttactgcaacctctgcctcccaggttcaagcgattctcctgcctcagcctcccaagtagctgggattacaggctcccgccaccacggctggctaattttcttgtatttttggtagagacggagttttgccatgttggccaggctgatctcgaactcctaacctcaggggatccacctgcctcggcctttcaaagtgctgagattacaggcatgagccaccgcacccagcctcaaaatgcttttgaacttgactgtcaggtatgccattctccacaccagtctcctcccatgtctgtgtcttctccctctccactggggacccttggctttttccacttcactcatctaccctgggttatctggtcttccataaccctgtcctctgccacacctcacttattcacccaccacaatatttattgagtactcactaggccatgaaagatgctatacaaaaaaagcccctgtcctcgtggagctgacattctagaagaaagcatgaataataaatacgacttaataaacagtacggccaggcatggtggctcacgcctatcatccaaacactaagagaccaagatgagaggatcacttgaatccaggagtttgagaccaccttgggaaacgtactgggaccctgtctctacaaaaaaaatattaaaaattagctggatagggtaatgcatgcctgtagttccagctacttgggaggacaaggtggaaggattgcttgagcctgagaggtcaagtccgcagtgagctgtgactgtgcactgcacgccagcctgggtgacagagtgagatcctgtcttaaaaataaataaataaacaaacaaacaaacaatataattccagagagtgaagaggcaggatctctttagctaggaagttgagggatgttctctctgagaaggcagaatctgagtttcaacctgaagaattcgaagaggccagctaggcaaaagatgagagttgaaggaatggggacggcagaggagacagccaatatagtaattctcaataaagcagaaagtgagcttttcctgctggcagaacagaaaggaagtcggagtggccagggtgttgtgggacaaggtggtcagcaggagtcacatcacgcaaggtcatgtggtcatggtagactttaaattttactccaagcctgatggaagccattggaagattttaactaaggagtgacggaaaactggcatctcaaactcaacatgtctacaacccagttcttgatctttgaaaccttcttcctccatcttccccatctccattgacagcaacttcatccttcagttagctcaggccaaaaccctggagtcacccttgatacctctctcctgctccacactcagtctttccattggaagccctaggggctgccatattgttctccatagcacttcacaccgtctgacatactatatcttttcccactattgctttgtccttggtagcatctttaggcactctctgaatatctggcacatagtacgtgctcactaaatccttgttgaataaatgaatgaacatcactccgtggtcctttcagaaccagagccattcttctctttcttcaccaccgttgcccctcaccccgcccaactagtcacaggagttgaaggatgacacagtagagaactgggattctggagtcctgtggctggtctggggttcgagttcttactcagtggtaggaacctccatgtgggattaacttatctggtctttagtttcctcctctgtaaaatgggcctcaaactgccaaccgctgggatgcagggaggatttgatgagcccaggcaggctccctggagcacagcaatcaatggcagctatatataaaccggggcctcttttgtactcccactgcctttgtcctagttccagccctcattacaccagcctgctcttgcggctccctcctaacttctgctccatcaccaccaatctgtcctttcagctgtcaggcttgtcttctgaacgccaaccctaatcacatcccttcctgctccaaaaccttacatgactctcactgtccacaggacaagacccagcctctagttgacagcctccactgtccagcttacccaacctctcccctaccacataccctgagtggagccttctgcctccatagggctttcttagccagagaagcctcccttatcttcctgttctcctcctaattccttcttatccttccagggaggaggctgtgaggtaatgcatcttgggagccagctgggattgcacagggtggtgagattatctgcatttccgaggcttgaacaagttaaggcaatgggaaaggtcacacaatgagaaaatgcagggccaggatttaacccgtctgagatgttctgactgtgctatgctgcctccccggacatgagctctgcgataatgctgtccccaggctgtaatcattccctctttcatccctgcctcctctatccctggggtcagagggacttgtagttgaatctctcactcactcattggtgtggtctctccctaaagcagggtggagtttgtcttagcgttatcactgcatccagcacaacctccctggtccaggcttatcagcgttcaactgcgtcaatgcagttgcctcctcctcaatctcccagcttccggccttgccccctagagagatcatattttaatacaagtcagattacatccctcctcccctcagaaccctccatggctcacaccttactcagagaaaaagccaaagtcctctccacaacccacaaagccctgcaccatccatcacctcactgccttcgtcccctcacaccctcccccttgctcgctctgcttcagccacaccaactcatctctgtttctcaaatacaccaggcatggcctagctattaaatgcacggtccagcctggtgcatttgaagaacacggatgaattggtgtggctggaacagagtgagtgagggggagagcgggaggaggacctttgcaccagctggacctttgcaccggctgttccatttgcctagagttttccctgacatattcatatggctcactctcttgcttcccttgctttctcccagtctttattcaaatgtctatttctctgcacttgtgctgtttgatacagtcaccgctggccacatgtggcctttgagcacttcagttgaaacacatgaaagtgtagaatattgaccagattccaaggaaaaccatgtgcaaaatatcttttatctcttaagatacagggtctcgctctgtcttccagcctggaatgcagtggcacgatcacagctcactgcagcctcaaaatcccaaactcaagtggtcctcccaccaacagcctcccgagtagctgggattacaggcacacaccacaatgccccgcccatttttttaattgttattattttttttaatagcgacaaggtcttgccatgttgctcaggctggtctggaactcctggcctcaagcgatcctcctgcctcagcctcccgagtagctgagattacaggcaggagcttttgtgcccagcaggtctacgatcttcttagaatgcttcaggctgggcatagtggctcatgcctcaaataccagcactttgggaggccaaagcaggcagattgcttgagctcaggagttcgagaccagcctgggcaatatggtaaaaccctgtctctccaaaaaaaatacaaaaattagctgggcttggtggctcccacctgtagtcccagctacttaggaggctgaggaaggaagatcacctgagcccaggaggcggaggttgcagtgagccaagattgagccactgcactccagcctagacaacagggagaccctgtctcaaaataaataaataaataaataaataaataaataaataaataaacaaacaaacaaacaaaccaataaatgaattttacctgtttctttttacttttttaatgtggctactagcaaattttaattttttttttttttttttttttttttgagacagagtcacgctctgtcacccaggctggagtgcagtggtgtgatcttggctcactgcaacctccacctcatgggttcaagcagttcgcctgcctctgcctctgagtagctgggattacagatgcccaccgccacgcccagctaattttttgcatttttagtagagatggagtttcgccatgttggccaggctggtctcgaactcctggcctcaagtgatctgcctgcgtcggcctcccaaagtgctgggattacaggcatgagccaccgcgcctggctataaaatttcataagtagctcttaatagatttctcctgggcagtgctggtctaaacactttttttttttttttttttttttgagacggcatcttgctctgtcaccaggctggagtgcagtggcgcgatctctgctcactgcatcctctgtcacccgggttcaagctattctcctgccttagcctcccaagtagctgggactacagacacccgccaccacgcccagctaatttttgtatttttagtagagacgggttttcaccatattggccaggctggtctcgaactcctgaccttgtgatccgccagccttggcctcccaaagtgctgggattacaggcatgagccaccgcacctggctataaaatttcataagtagctcttaatagatttctcctgggcagtgctggtctaaacactttttttttttttttttttttttgagacggcatcttgctctgtcaccaggctggagtgcagtggcgcgatctctgctcactgcatcctctgtcacccgggttcaagctattctcctgccttagcctcccaagtagctgggactacagacacccgccaccacgcccagctaatttttgtatttttagtagagacgggttttcaccatattggccaggctggtctcgaactcctgaccttgtgatccgccagccttggcctcccaaagtgttgggattacaggtgtgagccaccgcgcccggccctgtaacacttttaacactgaactgtttgccttccaggtggtaaagagcaggtgcctttactgatagaaatgtcaccactcccttcatcccgccagccccatgtcactgacgcgtcctttccccttgctctgtggtaactttctcctaagcactcatcgccctaacatctgtcatacaggtatacctcagagacactgctggtttggttccaggtcgccataacaaagcgaatattgcaataaagggagtcgtgccttttttggtttcccagtgcacataaaagttatgcttacactatagtctgttaagtgcatgatagcattatgtctaaaaaaaaatgtacataccttaattttaaaatccatcaaggctgagcacagtggcttgtaatcccaacactttgggaggccaaggcaggaggattgcttgagcccagggatttgaaaccaggcaacaaagtgagaccccgtttctacaaaaaaattctttttaaaaatagctgggtatggtgacgcatgcctgtggtcccagctacatgagaggctgaggtgggaggctcacttgagcctgagagattgagactgcagtgagctgtgatcacaccactgcactctagcctgggggacagagtgagaccgtatctctcaacaaaaattaaaaaaaaaaaaaaaaaaggctgggcacagtggctcatgcctgtaatcccaacagtttgtgaggccaaggtgggtggatcacttgaggtcaggagttcaaaaccagcccagccaacatggtgaaaccccgtctctatgaaaaatacaaaaaaatagccgggtgtggtggtgcacacctataagcccagctactcgggaggctgaggcacgagaattgcttgaacctgggaggcgggggggagattgcagtgagccgagattgcactgctgcactccagcctgggtgacagactgagactctgtctcaaaaaataaataaataaataaataaataaataaatgttttattactaaaaaagttaacaatcatctgagccttcagtgagtcctcatcttgctggtgaagggtcactggctcagtgttgatgggtgctgactgatcgtgggggtggttgctgaagattggggtgcctgtgacattttcttaaaataagacaagaaagttttccgcatccatcgactcttcctttcacgaaagatttctctagcatgagatgcttgttgacagcaattttacccacagtagaacttttttcaaaattggagtcagttctttcaaaccctgccactgctttgtcaactaagtttatgtcatattctaaatctcatgttgtcattttaacagtgttcacagaattttcaccaggagtagaatccatctcaagaaatcactttctttgctcttccataacaagtaacgcctcatgcattgaagtttgatcatgaggctgcagcaattcagtcacatcttcaggctccacttctaactctagttctcttgctagttccatcacttctgcagtgtcttcctccagtgaagtcttgaactcctcaaagtcatccatgaggatcggaattgacttcctcaaaattcctattaatgttgatattttgacctgttcccacgaatcacaaatgttctttttgttgtttgtttgttgtggattgtttttttatttttaattgagttgaggtctcactatgttgcccagactggtcttgaactcttggcctcaagtgatcctcctgccttgatctccctaagtgctgggattacaggcatgagccactggaacagccacaaatgttcctaatggtatctagaatggtgaatgcttttcagaaagttttcaatttcctttgcccagatgcatcaaaggaatttatctatggcagctatagccttatgaaatgtatcccttaaatcataagacttgaaatagagaattacttcttgatccatgggctacagaatgaatgttgtggctgggcatggtggctcacacctgtaatcccagcactttgggaggctgaggcaggtgggtaacttgaggtcaggagttcaagaccagcctggtcaatatggtgaaaccccatcactactaaaaatacaaaaattagctgggcatggtggcgtatgactgtaatcccagccacttgggaggctgaggcaggagaattgcttgaaccctcttgaagacagaggttgcagtgagccaagatcacaccactgcagcgacagagtgagactctgtctcaaaaaaaaaaaaaaatgttgtgttagaagtcataaaaacaacattcatcttcttgtacatgcccattagaggtcctggataaccagtgcattgtcagcagtaatattttgaaagaaatcttttttctggctgggtacagtggctcgcacctgtaatcccaccactttgggaggccgaggcgtgtggatcacctgaggtcgggagttcaagaccagcctggccaacatggtgaaaccccaactctactaaaaatacaaaaaaattagccaggcatggtagcaggtgcctgtaatcccagctaccctggaggctgaggcaggagaatcgcttgaacctgggagtcagaggttgcagtgagctgaggtcgtgccattgcactccagcctgggcaacaagagtgcgacttcatctaaaatacatatatatatataacatgttatatgtaatataaattatatatataacatatatgtaatataaattatatatcacatataacatatatcatgtgttatatatatcacatataacatatgtgttatatatcacatataacatgtgttatatatcacacataacatatattatgtgtatatatgtcacatatattatgtgttatatatgtcacatataacatattgtgttatatatatcatatataacatatattatgtgtagtgtatcatatgtaacatatattatgtgtagtgtatcatatataacatatattatgtgtagtgtatcatatataacatatgtgtagtgtgttatatataacatatattatgtgttatatatctcatatgttatatataacatatattatgtgttatatattatatatatatttttttctgagtagatctcaacagtgggcttaaaatatcagttatccatgctataaacagacgggctgtcattcagtcttcattgttccatttatagagcacaggcagagtagattcagcataattcttaagaccttaggactttaggaatggtaagtgagcattggtttcaacttaaagtcaccaggagcactagctcctaacaagagagtcagcctgtcctttgaagctttgaagccaggcattgacttctcctctctagctatgaaagtcctagatggcaacttcttccaatagggcatttcatctacattaaaaatctattattcagtgttgccagcttcattaataatctcagctagatcttctggataacttactgcagcttctccatcagcacttatcacttcaccttgcacttttatattatggggacaccttctttccttaaacctcatgaaccaagatcttctagcttcagatttttcttctgcacttccccacctctctcagtcttgctgtgggcttgctgtggattaggctttggcttaagggaatgttgtggctggtttgatcttctatccagaccactaaaactttctccatgtcagcaagaagcctgtcttactttcttatcattcatgtgtttactagagtagcccttttaatttccttcagtaatttttcctttgcattcacaacttggctaacctctagcttatggccttttgtttgtttgtttgttttgtttttgagacagggtctcactccgttgcccaggctggagtgcagtggtgcaatcaccgctcactgcagccttgacttcctgggaccaagtgatcctcccacctcagcctcctaagtagctgagaccacaggtgtgcaccaccacacccagctaatttttttattttctgtagagatagggtctccctattttgcccaagctagtctcaaactcctaggctcaagccatcctctcacctcagcctcccaaaatgctcggattacaggcatgagccaccatccctggccctatctcagcttttgacacgccttcctcactgtgtttaatcatttctagcttttaatttaaagtgagagacgtgcaactcttcttttcacttgagcacttaaaggccattgtacagttatacactgacctaatttcaatattgttatgtctcggggaataggaaggcccaaggaaagcgggagagatggggaaatggccagttggtagagcagtcagaacacacacaatatttatcgatcaagtttgccatcttctatggatgtggttcgtggcacccccaaacaatgactatagtcacatcaaagatcactgatcacagaccaccataacagatgtaataattatgtaaaagtttgaaataccgtaagaattaccagagtgtgacacagagacgcaaagtgagcacacgctgttggaaaaaaaatggccctgatagacctccttgacacagggttgccacaaatcttcaatttgtaagaaacacaatatctacaaattgcaataaagcaaagcacaatgaaatgaagtcttcctcggccggtgtggtggctcacgtccataatcccagcactttgggaggccaaggcaagaggatcccttgagcccaggagttggaggccagcctgggcaacacagggagactccatctctagaacaaaacaaaacaaagcctgcttatatttattgggtttactctcagtctcccccacacagagatagggcctggcttgttattagtgctcagttgatgtttgtgaagtgaaatactaaggacttaaccactgcctgttctttgctgttcatgccctgacagcttttatgtgccagcacagaagaaaacaaggtgcaagaagagaatagtgatctctaagtcagaatttgaggaacccaaattagtaccagaaagctgggaggagaagagaaaaataaagtaaatcaaattaaaagttgaatgggccaagtgcagtagctcatacctataatcccagcactttgggaggctgaggtgagaggatcacttgaggccaggagttctagaccagcctgggcaatatagcaagaccccatctctacaaaaaaaattttttaattttctgaatatgttgttgtacacctgtagtcccagctgcttaggaggcagaggtgggaggatcgcttgagcccaggaggttgaggctgcagtgagctgttgttgcaccactatactcaagcctgggtgacagaataagtccctgtctccaaaaataaaaataaataaattcattttttgtaaagttgtatgtcatggcccctgcctactctggcttcatgacttgctgcttgaacctcaccatccaaatcccagtggtgacaccatgtcatttcttgaatttgccaagccctctttcagtcccaagctctctgtcatggccactctcagcctggaaagttctttccccactggccagatttctccccctcatctatgggaacttgacttgaagtagggggtatcccaggccctggactagttaacacgacctgctgtgtgcccctcaaagccattgtcttcctagctgagaaggcatcacacctgcaacagattcactcattgtgtgcatgtttttcttaaccacttctcttctgcatcagctccatggggcagggatagtctcatatgtcactctacccagcacataggatacgctcagacgcccacttgtggatggtggaaaaggtcagcccaacctaatatgcccatctctcctctaggggtaatcttgagaaaaaaagttgggaacttgctttgtgttagtttaggatgacccagaatagatcctgaaacaagaatttagggcaatccttgtgcaagtagttcatctgagaggtgaccccagaagggttggagaaggagaggggaggtggggcaaggaagggtgagttgtcctgtaggcaactgagctccgtcctactgggagcccacgtggaactcacctcttaagtgatccagaatgaagggtgagggagctgcggtattgatccaccaactcccagcaatctttggttgagggctgctcccttaaagttcattccctgggcctgccccagatttggagacagccctaaggcaagaggtacagataccagttggccacagactgaagtgttaagacccaagcccctggataaaactgaaaaatcaagccagatgtggtggttcccacctgtaatcccagctactcagtaggctaaggcaggaggattgcttgagcccaggagttcaatgctgtagcgagctatgattgcaccactgcattccagcctgggcatcagagcaagaccccatgtctaaaataaaaataaactgaaaaatccccaagttatttgctgtgaccaaccttccattaaccacagaccctctggtattcagcatttcttgtccattatatgaagttctgatgacagtctcttttattgtattgtgccttgaccacgcactgtacatcacttagctctgaaatggacatgttcaggaaacagggccaggtgggaccctgtgtttcaacagcaatacttttacaaatgaggtctcatgacagggtcttgctcggagggtttctatggaagcctcatcccacctactgctatcatccttactaacttgcatttacaaaagggactctttttgaccagaggcttggggtctgtagctgccttctagccagctgatgctggctggtccacacaagcaggatcacacccatttttttgttttcttatttatttctgaataggttagcataccggtaacctgtgtgcctggcattgtgctgaccactttttgtcaacttactgaatcctcacaacccttggaggtattgatactattgttatccaggttatacaaaagggggaaactgaggcacagagcagggatgtcccttgcccaaggttacccaactggaaagtggcagatctgggatctgaacccatgcaggctgggctcttaacactgaactactttcctgccatttgttaaagagccacaaaccaggccaggcaccatggctcacgcctgtaatcccagcactttgggaggccgaggcgggtggatcacctgaggtcaggagttcaagaccagcctggccaacatggtgaaaccctgtctctacaaaaatacaaaaaaaagtacccgggcatgatggcgggtgcgtagtaatcccagctactcgggaggctgaggcaggagaatcccttgaacccgggaggcagaggttgcagtgagctgagatcacaccattggagatcgcactccagcctgggcaacagagtgagactctgtctcaaaaaaataaaataaaataaaataaagagccacaaaccccgaaaggtctgccattcccccagggccccaggccaccccacaatctattgtcattgtaggttgtgaaatatactgaatgtcaccccaaccttgagccatggggaagattccatttctctcattgcaacatttgtgcaacatgaaccatctgttgggggtcttcgtaaatcaccttttatcccgtgaggcaggtactgttaagaccattttacaggtgacaaaactgaggccagtggtgtcgagtcacctgcctgtggtcacccaaccaatacaggacagcttggaatcccaagcacccccgccctgctgtctgacccccaaaacccaccctctgttctccattctggcttctttctttcagcatcttggcgacagttgggacggagtttgacctacggacgctgagggcagttcgagtgctgcggccgctcaagctggtgtctggaatcccaagtgcgtgagtttccgaccctgacaaggggtttgctcacgggccccaggagccctcagtttcccctatgcagagcatctcaggaggccacatcctgccaccagcctgtgtgagggcagtctcttctttgggactccctatagggaaccccctaggaatatgactgtagctccccatgagctcctgaaagcaaactaggagccacacccatttattgagcacctactgtctatcgggagccatgctaagcaccacgtgtgatctcattcagtactcacagccctatgaagttgataggactgatgtctctattttatggagggggaaactgaggctcagagtggctgaaacattggagcagggttttgtggctgagaagtggcagaactaggagtgagcaagtgtgactccaagcctgggccgtaccactggtggcaatgaccattcccatttaatgagtgcctgctgcgtgcagggcactacagaaggactttacatgaattaccttatttcatcctcacagtcacccagcgaacacccattttacagatgagacggttgaggcttaaggaggttaaattactcacctgaattcttagagtggacagtaatgagctctaaaattcatactcattccttgctgctttctcattctccacagatacatctagtccccgtttaagggtggctgccatatgcagggtcaagattaagtgtaggttgagccaaaaaaaaatgtaaaaagcaaaaataaaacagggctgtcctttttctatcttcttgtcttggttaataataataatttagccaggcatggtggctcatgcctgtaattccagcactttgggaggatcacttgaggccacaagttcgagaccagcctgggcaacattgtgaggaacaccacccccacccccccgccaatatctacaaattttttttttttttttagaaattagccaggttgactgggcacagtggctcacacctggaatcccagcactttgggagaccgaagcgggcagatagagcgagctcaggagttttaagaccagcctgggcaacatggcgaaaccctgtctcaaaaaaaaaaaaaaattagcaggcatgatggtgcacacctgtagtcccagctacttaaaaggctgaggcaggaggatctgagcccaggaggtcaaggctgcagtgagctgtgatagcaccactgcactccagcctggacaacagagtgagaccttgtctcaaaaaaacagacaacaaaaagtttaaaaacaaacaatttataggctgggtgcagtggctcatgcctataatcctagcactttgggaggccaaggtggatgggtggatcacctgaggtcaggagttcgagacctgcctggccaaaatggggaaaccccgtctctactaaaaatacaaaacttagccgggcgtggtggcgggcatctataatcccagctactcgggaggctgaggcaggagaatcacttgaacccggggggcggaggttgcagtgagctgaaatcacgccactgcactccagcctggatgaaagagtgaaactccgtctcaaaaaaagaaaaaaaaaaattaaaaagcacttactatgtgccagacattattctaagtatttccatttttttaaagtcctttatcctcccaacaagcctgtgaagtagtctcttttattatcaccattttacattttattggcttcgttcttccggttcattgctacccaggtttaaagagtaagatttcccagaggatcaccagcaggatctttttgtagaaagaagacacttctatccaaggtctctgcaagatcccagcagatgcctgcatcatattaaattaagggccatcccaaatctaatagtcaaaagagccaggtgcagtggctcacacctgtaatcccagcactttgggaggccaaggcaggacgattgcctgaggctaggagttcaacaccagcctgggcaacaaagtgtgaccctgtctcaaaaaatatatgtatattataatagcagtagtaacaagagtctctgtttaatgaccacctatgacttaccaggtacttcactgtgtgtgaactctctcatctaatcgtatgagggaggtactattgcagtccccatttacagatggagaagctgaggtttggaattcactagtaagtggatgactaggtcaggttcccttgaagcggatacttaggtgggtgttcagatgcacctgctttattgggggacggctcttgggagagacagcaggagatcagcagggtggggctggggaatggatagagcagggacgcaatttcagctggagtgtgtgtgacaccagagttgtcctccaatgcatggcaaggatgccggccttttgtacttctatagtcagtcactgtggatgggaggtagagacgcagtagctcccaggtgagatagcttttgatcaccaagggcaattctactaagaagagaggcagctgggaggcattagcaaccaacatccatagcagctggagggcgggtacaccagaaagaaaatgggatcttggccagacaccaagagtatccagcaccttaaccactgcaccacactgcatctgttagcacccacattacattttttttttttttttttttttttgagacggagtctcgctctgtcgcccaggctggagtgcagtggcgagatctcggctcactgcaagctccgcctcccgggttcacgccattctcctgcctcagcctcccgagtagctgggactacaggcgcccgctaccacgcccggctaattttttgtatttttagtagagacggggtttcaccgtgttagccaggatggtctcgatctcctgacctcgtgatccgcccgcctcggcctcccaaagtgctgggattacaggcgtgagccaccgcgcccggccagcacccacattacatttttaagcccttggagtggcatggcccctcgagctatcctgacagcttccctctcttactgtggtctccacccatcaagagccatgggaagttcctgcaatcaagaagcaaagcctcaggctatatgtttgaaccttcattttgatcatagactttcctagtagataccatagtggttacaaacataggatgttgtcatcgttcagacctgagttaatagcctcaagaaaaaaatggtagtggaaccaggtatggtgaagtgtgcctgtagtcccacctactcgggaggctgaggcaggaggctcgcttgtgcccaggaggtcaaggctgcagtgagccgtgatcatgccactgtattccagcctgggtgacagagcaagcccatctcaaaaaaaaaaaaaagccaatgataggcagagaaatactaactaaggctcttgctctgtcgccaggctggagtgcagtggtgcaatcacagctcagtacagcctcaacctccccagactcaagcaatcctaccatctcagcctcccaaatagctgggactccaggcacacagcaccatgcccagttaatttttttgtattttgtagagacagggtttcaccacgctgctcaggctggtctcaaactcctgagttcaagtgatccacccgcctcagcctcccaaagtgctgggattacaggtgtgagccaccacgcttggccagctattattattattaacattcttcgagtcttacaacagtggaacttttagtgcaggatgcgaatttcagtattaaccccttcctctcccaaaaggatttgaagcccagagtaattcagccgccatgaatgaaccatttgttagatgagaggctactggaggctgagcttggtaggataagagcttgcatggggtccctgattgatgacaatacccccagatttaggtcttcagatgcccagttgggtgtgtcttctgttccactgtgtcccttcggggactgttccctgccttctttctttttgagatggaatctcgcactttcacccaggctggagtgcaatggcgtgatctcagctcactgcaagctccacctcccgggttcacaccattctcctgcctcagcctcccgagtagccaggactacaggtgcccgccaccacgcccagctaatttttttgtatttttagtagagacggggtttcaccatattagccaggatggtctcgatctcctgacctcgtgatctgcccgcctcggcctcccaaagtgctgggattacaggcgtgagccaccacacctggccccctgccttcttattcaccaccatctttctgaattgggttgctcagaacagagaaagcaacatcagcacatgggcaaacatggggcttcatttcagatggacctgggttcaaatcctagttctgcctttttttttttttttttttttttttgagacagagtcttgctctgtcacccagactggagtacagtggcgtcatcttggctcactgcaacctctgcctcccaagttcaagcaattctccttcctcagcctcccaagtagctgggattacaggcgctggccaccatgcccagataattttttgtatttttagtagagatggggtttcaccatgttggccagacttgtcttgaactcctgacctcgttaatccgctggcctcggcttcccaaagtgctgggattagaggcgtgaaccgccgccgcgccctgcctagttctgccatttctcatgcattctctgggtgaatcacagcatctctgttagccttgcttcccacttctgtaaaatgagagtgactttacatgtatggccacctcaggggcttgtcactagaagccagtgaaataatgttgagtctggttccttggggttgaaattgggaccgccaaccgctttcctacccagagcagcaactagcctatatggcggccttttatgaatgaggaaaagacaccgcctcttggcagaaaaaaaaaattaagaaaatggctccctcttctgggtgcaagttgcccaacacccaggaatatggctccaaaagcaatggactcccacccctttcttgcccaaaagatcatcaaatggaacagcatgtcaaatacctttattaagtactttaaagttggctgggctctgtggctcatgcctgtaatcccagaactttgggaggcagaggctggaagatcgcttgaggtcaggagttcgagaccagcctggataacatagtgagaccctgtctctataaaatatatatatagatttatttgagacagcgtcttgctctgccactcaggctggggcgcagtggcacaatcatagctcactgcagccttaacgatcctcctgcctcagtccctagagtagctaggactacaggcatgcaccatcatgcctggctaattaaaataaataaataaataaatactttaaagttaaaagtgctttttaaaaaataataaggccaggcgtggagactcacgtctgtaatcccagaactttggaagaccgaggcgggtggatcacgaggtcaggagatcgagaccatcctggctaacacggtgaaaccctgtctccactaaaaatatgaaaaattagctgggcctactcgggaggctgaggcaggagaatggcgtaaacctgggaggcggagcttgcagtgagccgagatggcaccactgcactccagcctgggcgatataacaagactctgtctcaaaaaaaataaataaaataaataataataataataggggccaggtatggtggctcacacctataatcctagcactttaggaggctgaggagtttgagtccttggagaccaggggtttcaggccagcctgggcaacatagcaagaccccatctctacaaacaagttttaaaacttagccaggcatggtggtgcatgcctgtagtcctagctattgcagggactgaggcaggaggatcacctgagcccaggaggttgaggctgcagtgagctgtgattgtgccactgcactccagcctgggcagcagtgcaaaaccctgtctcaaaggaaaaaaaaaacctaggaagtgttgttcccatgataaggatcagcctccgtgtggtgcttccttcaccattgcccaatccccaggctcctgggtgcttaatattccctcaggaacacacctgctttgtctgggagagacctgggcgtcttggtggcggggtttgggggtacttgctcatgggcttatggggcctctctctgtgtccccccaggtttacaagtcgtcctgaagtcgatcatgaaggcgatgatccctttgctgcagatcggcctcctcctattttttgcaatccttatttttgcaatcatagggttagaattttatatgggaaaatttcataccacctgctttgaagaggggacaggtaggtccacggagcatgatgcatctttccagttttctccttcagggacaagctcttgggaggattaggcaggggtgtgcttctttctcctggcagctgggaggaccgtctccttcagagagcactacaggagaggcagtgagtgaaatagcctctgagatcttagctgttgaaaggggtggggttccacagaaggtgacccagcagagaaagagtttatttgggaatgatcccaggaagcaccatcgggggaatgaggaagtgagcagagaaagaagggatcttttaaagagtgtgctatcaagcgggttaccacttaaaactgggactggatccccctgggcacctctgggagacagcaaagaacacacaactcagctggtcacggtggctcacgcctgtaatcccagcactttggggggccaaggcgggtggatcacctgagatcaggagtcagagaccatcctggccaacatggtgaaaccccatctgtactaaaaaatacaaaaattagctgggtgtggtggcaggcacctgtagtcccaattactcaggaggctgaggcaggagaatcacttgaacccgggaggcagaagttgcagtgagccaagatcacaccactgcactccagcctggcgaaagagtgagactccatctcaaataaataaataaataaaaatataaataaaaaaagaacacacacctcagagccgtcccagccaaggggcaagggagctggggtatttatacactggcttctttttgacattggtgaggactgctcctagagtgggaattaatgcctggcacatctggctgagtggaacaggtattctgggtgctttcagacctcgaccagtcctgacttctaaagcaagcaagaagtggggagagttgggccagaaaagggttattgcctcaatgcattgtgagtggtaccttgtggaaggtgagagacagagaagattccaggcacaggtgccatgctaaacgatagttctcatttattataggaacccatggatttattttgttctctgccctgagtgctgggtgagagtactggatgagtcctcctggtctcccccaacccccaggatgtaccagagataccccaattgggagtcctggcaccaaccaatcagaacctagcactcagcagcattctgcccctccctgactatgcccacattaacccttcagtggctgggtctgggggtagggtgagccccggaaaagccaggcagcgcagagacactctcccagggctcagctctgaaccagcagtgtggaagcagtgtgtccaccacgatccacactcaggaaccaaatagcccttggatacgttttcagttaaatctttgccatccaaactctagctgcttgctctctaaagctccagaatgaaatggaatcaagtaggaagggatgccttcagtatttcagtatttggaccactggccatctgggtgcagacagactgaatagcagttctggttctgatgatttgggtcaagggagctgtgaattgaaggagtggatagaaggaatcaagaagcccaaaggggaacccaggtgggcagagaaagaggtttcaggccccttatttgggaaaggcagccacagaagaagattctgtctgggagtggatttccacccaccctctccacccagtgacccccaagtggatccgcagaggcagcccctgagccctccctccccactcctccccacggggagggaaaacccactggggaaggtttatttgcaatggttggaggtttgggtttttttgtgggttttggtttgttggttttttttttcctctttttctcttgctcctcctgtctctttctctcctgggcttgtgaagtttgctcaatatggaatgtcctaattatttctttccccgatgaagaaggtgttaattgaggcagagctatttctgctcctggcctcgtcacccaggcggaaatgcgagagagagagagagagagagagagaatgaatatggggcagggcctcttggaaaaatcagccgtgagcagagaaaccaggactcctggatcctaggtttctgtgaagttttattttatgtttttctaccctagactagctaaaggagaagaggccatggggttggcttgggtccgagtggggttttgaggggacagatgtgggtggtgccaccagaggggaggaagcctcgatttaggagaaagactgaaaagctagctcacgattaaaaatataagacgtgtgagtaagagacagatatatacagacacccaggcagtgggttaattttaaaatgtatttataaccgaattcctcagacactctggacgcttgtttttctagaagcaacgctcagagtgtttcgtgtcggtggttggggggttgagggggattgcaaagctgctaaagatagacccgttttcagtagcattcctcagtgtcgggagcccagttcctgtgtgcccagcaccgtgccaatcgcttagaaggaagcaaagataaagtggaaggcttcctgctttctaagagcttccaaaatagttagaggaaacaagacccctcatttgcagccatttttaacagtgaaggctaatgtgtgattatacccacgcccccctaaatatgaaaattcagtagctattgtatgcctgaaaggggccaggtgcagtggctcacacctgtaatcccagcactttgagaggctgaggtgggagtatcccttgaggccgttagtttgagaccagcctaggcaacatagccagaccctgtctctgctaaaataaaaatttaaaaattggccgggtgcagtggctcacgcctgtaatcccagcactttgggaggccgaggcaggcggatcaaaaggtcaggagttcaagaccagcctggccaacatagtgaaaccccgtctctactaaaaatacaaaaaaaataaattagccgggcatggtggcgtgtgcctgtagtaccacatacttgagaggctgaggcaggagaatcacttgaacctgggacatagaggttacagtgagccgagatcacgctactgcactccagcttgggcaacagagtgagattttgtctcaaaataaaaaaatttaaaaattagccatgagtggtggtacatgcctatagtcctagctactcaggaggctgaggaagaaggatcacttgagcccaggaattggaggctgcaaggctgcagtaagctatgatggtgcccgcactccagcctgggtgacaaagtgagaccctgtctcaaaaaaaaaaaaaaaaagagagagaggaaggaaagaaggaaggaagggagggagggagggactggggctgtgttaactgggctacacaaagaggctacatggagggtgggaattgagccagacttggacatggcgtggagacagagaagattccaggcacaggtgccatgctaaacgatagttctcatttattataggaacccatggatttattttgttctctgccctgagccttatgtttaaaagatttttgccttccaacctgtatttatcaaataatagttcatgtaccaagtccagcataagtgaggaaggcgtttccaacaacttaagttcatggcgaggctagacttggagtttctattcagccagagcttgaaaggccaacaagattcattcattcagcattggtttatttccctctgctgtgtgctcagtcaagggagcagagaattggtgctgcgaagtctgtagcacatacattgagagatatttttgttgagtaggaagcttgagtttacacacactcagctgtttgttttcttgtccgacaatgccacggtcgtctttgaaaaccttcaaaagcatcgctcacagaataaggtcctctcagacccgctgtgctggtaaaatgaggacactcccagatgtgagctttcctgcctccctaccccatcaataccttaagatttggactgacctttagcgttcagcctgactgccacctccccaggaagctgtctttggtttccagcaaaaggggtgtctgttggcacgtttctctctccttgtggcattttcacagcctgcctcctgctatttggggagaaagctcagctcctgttccttacccttaggcaagggtaggaactgtgtgtactggtgtccctcacccccagaacagctccctgagcccagtacatcccaagaagaaaaaaatcagcaaggcttataggagaataacacaatgcgcttgacaaatttgtcctaatggatgtcggaagaaggctgcacttaccagctacaccatgcacacggcacatttactaaaactgactatattatggaccataaagtttgtctcaacagaggtcaaaaagctgaaaaaaatacaaatacaaaacatattttctgaccgtaatgcaattaagctggaaatcagtaacaaaaagagaactctaaaagtgtttgcagattaacagacatgcctctcatttatggatgaaatgatatgatgtctgagctttgctttaaaaatattctaggctgggtgcagtggctcacgcctgtaatcccagcactttggaggccgaggcgggcggatcacttgaggtcaggagttcgagaccagcctggccaacatggtgaaaccccatctccactaaaaatacaaagattatccaggtgtggtggtggccacctataatcccagctacttgggagcctgaggcaggagaatcccttgaacctgggagtcggagattgtagtgaggtgagatcatgccattgcactccagcctgggtgacagaatgagactccgtctcaaaaaaaaaaaaaaaaaaaaattctagtggcaaggcaaagtgtttggaggggatacagaggaatagatgaaacaaaatttgccagaagtaaataggtaagtgtctaaattggtgataggtacatggtgaatcattatattgttttatacttctctctcgctctctctctccccccgttctctccctgtcttcctctcccctctgtcttcatatatatatatatatatatacacacacacacacacagacacctaataagtttttttaaaaaacaaatacatctaaattacccataggtcaaagaagaaataataatggaaattagaaaatattttacttgaacaataatgataatgcatgacaaaatgttgagatgcaggtaaagccacacttaaaggcaatttatagccttaaaggcagttaatccatccatctcaaaagtttaggaaaagaatagaaaaaaaaaaaaaactcatggaaaacataaagagaaaagtagtaaagctcagagaagaaattaatcaatagaaaaccaataatagacccccaaagccaaacattgatctctttgaagactgatcacgtttgtcccaaaagttattcgttccaacagcattatagagtcactggtccctatttctcagagctggttttccctgctccttcccctgacttttctccccttcccttttgtagatgacattcagggtgagtctccggctccatgtgggacagaagagcccgcccgcacctgccccaatgggaccaaatgtcagccctactgggaagggcccaacaacgggatcactcagttcgacaacatcctgtttgcagtgctgactgttttccagtgcataaccatggaagggtggactgatctcctctacaatgtaagtgatgctgggacagtgtgtgtggacaatcagagtctcagggaggtggcctcctgggaccagtgagactccaaggctgcaatggagggaccctgagctgggaaaggcagcccaaggacaacacagccccactgaagctggcctgaggctcaggcttttgaagattacaggggctcatgagcagaactctaactatagggcatagaagtctggagggcccccagatgcaacatcatttttcattgtgcaagtgtttagatataattttagatttttgaatacggaaaggttatgtgatccaaaaaccaacacagataaaagatagagtaatatctttggacgtaggcgaggggtccctgccctgaggctcacccagtccttctccagccataccactccccgtgggatgagaagttcctggagccaaggggatgtgtctaccaagagcttgtgccccactttgtaggccatgttttaagttaccaggatcctggaattccctgcccatggccagattccatgaacttgcgtgcaattctcatatggatctgttcgtaacccaactgagggccaaggacatccgaggggtggctgttaacacaaatgtggccagagcttggatgtacaagctggaatgcccacacatatgtgtggagcccctctggcaggacagagccatgactaagaagagaaagggacaggacagggctggctctccccacaccttgacccagtgcagatatccggattctaaattccaccctgaccttccaaagtgtaaaggaaggtatatttgcaaagtagaagcacacagcatgttttatttagttaccttttcaatatttccccgtagtatgtggtctgcttttgtactcttgccctagatcttaaaaatgttagggatgtttctggaaagatgtatccctgcccccacttgcatgctacttcctcttcccacaatatgcaacccctttagttcctcagaatatccttccaatgtttatttatgcaattataattataagcataatcgaatctatgtcctcccccctctttcttatcccaaggagtagcattctatacatgctgttcaattctgtgatttttgttttctcataaccacacgttctagagatctttccactgcaggacatggacagtctcttcacgggtgcacactagtatgcccagctaatttttgtagagacagggttcttccgtgttgcccaggcaggtctggaactcctgggctcaagcaatcctcccgcctctgcctcccaaagtgctgggattacaggcgtgagccaccacgcctggccttctttattcttttgcacagctgcatagcattctattgtgtggctgcccatagttttatttgtttgccattaagagaaatgcttgactggcttcctgtccactgacatggaacatgatgctgctctgccaggagcatgttgcacgtacctcttcatacttttgcagatatagctagggggttggagggtctccattcccagaagtgggattgcaggatcaaagactaaatgcatttataattttatttttggggaagatttttgttttgtttttttggagacaaggtctccctctgtcgtccaggctggagcgcagtggtgtaatcatagctcactgcagccttaaactcctgggctcaggtgatcctcccaccccagcctcctgagtagctgggaccacaggcacacaccaccatacctagctaatttttaagaacaattttatagagatggggtctcactatgtttcccaggctgctctcagactcctggcctcaagcaatcctcctgcctcagcctcccaaagtgctaggattacaggtgtgagccactgcacccagcctaaatgcatttataattttgatagatatttaggtgtgcaagttttaaaccccactctgtcctcaccacagttcaccttccctcacctactatgcaggtaagcagtccccaggcaggtcacttgtcagcagctggagtggggcagagccaaggattcaggatcaaacacaaggatgccacaactgtagtgaccccatagagcaccctggggctgctccatacacacagctctgttgaccagtggaggtctcctcttcacctgccctaagggctgaaattaccattgaagtttaggccagcggttggcctgacccgggagcaatacctggcttcctcctcctgtacatagagaagctgaactttcctcttggtcctagtgtatgttccttaacaacccatttatgcctagtgttccattattggaatgctaatcctgtgggagttatttacatcctgctgctcaaggtcatcactaaggtcggatttttcacacacacaaaaattgcaacctccggcataaatgggttaaggaatttccccacttgtgggtggagggagatttgcaaaaactcatccttgtaatcctgatcaacaaaggcccgttttagttgggagtaggcagcaaaaggagccacatgaacagttgcgcctgtcacgcactgcacaagaatgtcattcatatcatagacaacatacgatttctactgttatcctgataatttattgacagaaaaaaggatgtggggaagggacatggtgttctaatttgcatgaaaacctcgtctgagtgtagcatctctgggaacatgcagcagatccgagctcaggccctctcttggccgtcacctgcaaacagcttggacaaagggtcagcccaattggccaaaactcactggggaatttttgtgggttctaggtttttactttgcaaggctggtgtgagaggaggttccagcaggaaatgaaccctcctgagagggaaagagactgggaaatggagaaggctgggaactcagggagagaatgggagtggggaatgggagctgaaaaaaattgtgagcataaaaaagggatatgtcacagggttggatgaccagagaaagcgtctgggggttcagattaagatgctgggggcgtgcccagtggtgggacaggaagcatgaatttccagagggctcggttataaacatcattgtccaatgggtgtttcccttggaagcctctaagcttagagctaagccacctctggggacacaaactgagtggttaagagcagagactcaggtgtcagcctgtctgggttccttccgactcttccacttccttgctgtgcagccttcggcaaggtgcttggcctctctgtgccactatttccacatgtgcaaaacgaagagaagcatagtcccacctcacaaggcacgaggactaagtaaggtggattcgcatgaagtgtttagaactgatcctggcccggggtgacctccgtgtaagtcaaattccccaccctgcatggtgttccttttagaaatgtgcatgaatttttcattagaacagctccagcagtgcctgaggaagtggagtgaggtgtgagaggtcttactttattcccctcgctggccctgctattaaccactaactcagagtagctttctagcactttccacacatttacatcccaccctcgtcctttggttagcagcccatgcaatgatttggccttaatgtgaacctagaacacagcttctcgcccagggatgatttctgcccccaggggacacttggcagtggctgcagacatttttggttgtcacaactggatgggaagaaggaggatgctattggcatcaagtgggtaaaggccacggatgctactcaacattctacaatgcacagcatcccccacctctgccccaccatagagaatgatccaggcccaaatgtcagtaaggtttctgtcaggaaaccctgggtcagaagaccaaggttccttgaggacggggatgccttatactgcaatcagctgtcactctctgcctctctctggggctgctgtgatcacctggcctgcatggacaacccctaggagcagcccccatccagtgcctggagaagtcagtggataaataccccagctccctccctgtcgggcgttttgctctgccctgcatctctccagtgggatcaggctctggttgcccgcagggttaacctggtcacgtacacacccttcacttgccaccttcccttccctgtctggtatttcctgggatgaacttttagatttatttcctggggctgctataatgaagcaccacagactgagtagcttaaaacaacaggaatttatggtctgacagttctggaagccagaagtccaaccccaagatgttagcagagctgacaacacgcccctcaaaagcctccgggggaggatccttctttgcttcttcctggcttttgctggtttcccacaatctttgggattccttggcttctagagccttcattctccattccagtcttctgtcatctaatagcatcctcccagcccgggcacagtggctcacgcctgtaatcccagcactttgggaggccgaggcaggcagatcacttgaggtcaggagtttgagaccagcctggccaacatggtgaaaccccatctctactaaagatacaaaaattagccaggcgtggtgggcgggtgcctgtaatcccagccacttgggaggctgaggcaggagaatcacttgaacccgggagatggaggttgcagtgagccaagatcatgccactgcactccagcctgggtgacagaatgagactccgtctcaaaaaaaaaaaaaaaaaaaaaaagaaaaagaaaagcatcctcccttcgtgtgtctgtgtgtgttctcctcttcttagaaggacatcagttgtattggatcagaacctaccctactccagtccaacctaattttaactaattacgtctgcaattaccctatttccaaataagatcacattctgaggtaccagggggttaggacttaaacatttttgtgtgtgtagcaggaggacgtaattccatttataactcctcctaaataaaacgacttgcatgtgaactcttgtctggggcttcccaaagtgagataacccctctctctacccctaaaacaacgagtagcgtctgtcaatgccagggtgcaggggctaaggtgcccatctttgagtttctgctgaggaggacacagctgctacgttggagcactcttgggttctgccttcgtgcccagccatctcccttgggctagccctgccctgggtctatcctagaatgagcctcgatctgtttggccataggcaagcagagtgtctggaaatctttgtcctccatgactggtgctggagccgaagccagtgggtgtggccttgccagccaactccatttacccagctctgaacaagctagtagttgagatcaacggagagtccagacagtcgctccaagcatcttggaatccatggacacaggtgtaccgcagaggcttcccacctgggtaggcagccctttgtaagatcctggcaccacatttattctcttaacatcctttcagttatccagtaatcatttattgagcacctactgtgtgccaggcaatgattaggtgattggagacactgcaacgaagaagacagactaaaatctccaccctggtaggagagacagatgcaaatggtaaacatgataaataatcaatcacccagaaagcaggagacactaagcaaatgtgtatgtactatgggaagcccaataggaacgaaagctacacaagagaacaagtgatgggtggttccttagtctaggtcaggcaatcagggagggcttctcagaggaggtgatgtttgagcagagaaggagggagccaggcagatgttttggaaacagcattctcagcatggagaacagtggcagctcacctacaggatgtgtttgattcccttccagattttgtattcgtttcttgtttttctcccttggcttcctggtttaaatgccttttgaagaaatctaagctcaactaatcagcgatgctgttgaaggtttatatcaggatatgcatcccagagttatttacaaaattagaacaaaactggaagcaattgaaagcctgacaataggagatcagttaaataccgtatggtccttccgtatgatggcatattatgtcatcattaaaaatcgtctgctgggagaatattaaggatacaggggaaaggctcaccatataatgatgagtgggggtgctgggcgcagtggttcatgcctgtaattccagcaatttgggagtctgagatgggtggatcacttgagcccaagagtttgaggccagcctgggcaacacagtgaaacccaatctctacaaaaaaaaaaaaacaaaaatacaaaaatcagccaggcatagtggcgtacatctgtagtcccagctactcaggaggctgagacaggaggataggatcacttgagccctggagtcagaggtggcaataagccgtgatcacgccactgcactccagcctgggcaacagagtgaaaccctgtcaaaaaacaaaacaaaaaaaatgatgagtgggagaaacaagtttttaaacagggatcaaggaggccaggcatggtggctcacacctataatcccagcactttgggaggccaaggcaggcagatcacctgaggtcaggagtttgagaccagcctggccaacatggcgaaacctcatctctactaaaaatacaaaaattagccaggcatggtggcgggcgcctgtaatcccagctacttgggaggctgaggcaggaaaatcgattgagcccaggaggtggaggttgcagtgagctgtgatcatgccactgcactccagcctgggcaacagagcgaaagctgcacgagagaagaagtgatgcatggttccctagtctaggtcagccaatcagggagggttcctaagaggaggtgatgtttgagcagagaaggaggaagccaggcagatgttttggaaacagcattcccagcatggagaacagtggcagctcaccctgtctagaaaagaagaaatgataagaggggaaaatgagtttttaaaaaggaatcaaggggaggtaaaccttatgatctcaaaggtacaaatatgaaaatataagtaaagaaaaactggaggacactgtaccaagctgaccttcgggtggtgggatttgggaatcttgatattctcaatacttctttgtatcttcaaatttctctatgatgatcacagtttactttttttttttttttttgagatggagtctcactctgttgcccaggctggagtgcagtggtgcgatcttggctcacttggctcacctctggggttcaagcaattctcctacctcttcctcccaagtagctgggactataggcatgcaccagcatggtcagctaattttttgtatttttagtaaaaatggggtttcatcatgttggccaggctggtctcgaactcgtaagttcaagtgatccaccaacctcagcctcccaaattggcttgagccaattaaacttgtcttgctaaatggttagcggggagaaagaagaaggtctcgggtcattcctagaccaggaggcagggagaaagggaggagaatgaacctttcttaggcaaacagtgtcctaggtgtccttatcttacataatctgtcgagagagtcacactaaaataaatcattgattgattgattgatacatcaataataaatggccagccttggtggctcacatctgtaatcccagctacttaggaagctgaggtgggaggattgtttgagacaaggagttcaagaccagcctgggaaacacagcaagactcatcttaaaaaaatttttttttttaattagccagatgcggtggctcacgcctgtaatcccagcactttgggaggccgaggcgggtggatcacgaggtcaggaattcgagaccagcctggccaacagggtgaaaccccgtctctactaaaaatacaaaaattagccaggcgtggtggcacacgcctgtagtcccagctacgcaggaggctgaggcagaagaatcatatgaacctgggaaacagaggttgcagtgagctgagatcacgccattacactccagcctgggcaacaagagcaaaactacatctcaaaaaaaatgttttttaattagccgggtgtggtggtccatgtctgtagttccagctacttgggaggctgaggcaggaggattgcttgagcccagcagttcaaggctgcagtgagctatgatcccgccactgcactccagcctgggcaacagcaagaccccatctcttaaataaacacataagtaaataaatgatcatttttattttattattaaatacacaagataaatgaaaaacaggcaaatctttcttacaaaagaattccatttaaagtatgtaaacttcactccccactgccccaggaggtggagactaatctcccctactttgagagtgggctggatttagtgactcatttccgaagaatagagtaggtaaaggggaaaatagaagttttatagcggaggaacagatagataccactttaaccaaatgatgaagattagtatcccccagggatgtggatattatgtaacccttgattttatgcctatatagcgttcttcccaaaaactcctaatcccagttttttggggttttgctctgtcttctaagctggagtgcgatgatgcaatcatagctcactgcagctcaaactcctggtctcaagcgatcctcccacctcaacctcctgaatagctagggctgtaagcacataccatcatgcccagctaattgtatttttttggtagagacatgttctcacacattgcccacgctgtcctcgagctactggcctctagtgatcctcccaccccagcctccagagtcactgggattataggcatgagccactgtgaccagcccagaatttttttttaaggagttgtgatgtcgtttaagagatgtgattcttcataacacatcaacaacaagtcccagcgatgggttggataagtcttgggatttcatgggagtattaagcttaaaagactttgcatgatatctgtgaactatatgtgatttctgttggtaatgggggtcactgattctgcggtttgccacctccaatcatcatggaagaaaatgttccacttccagtgaaagtaagaggaagtaaaggggtaattattttctatctaaattcacgaactccttgaattctgtccacagacccctaagtgtttcctccccaaggtgaaactgagagaatcttgccagtgccttccgcagtcactgtggctagaaaacccctcagaagaggtgatagtttagcaggtaactggagttctcaccatccgtgtctggctcagcccccatcacaaccagttacccagcccaaaatgtcagtagtactgaggttgagaggctctgctctaggaggccaggcctctcagaggaaggaggattggggtactggctgggcctcaagatgaacctaccccctaagagctttgggatggcgtgagtttctgtccatacccaaggactacaaatgcaggtttactggaaattctgtgccaaaagtgaggtccaactcacttctaactgctacaaaacaaacctccatcaacatagcccatctctgttcttgacctggaagctccaaggtatccacatggctcccatgcccactagacgggcctcttccctggaccttcctgggccagagaaggctctgggtagccttgtggaatcaagatgggtgatcagccacttcctctgtgccaccctgttttggctacttccctaggcatcagcctgggattccttgatggtaaaaatataaaactctctgagctagggcctttaatatccccattttacagatgaagaaactgagtcccagagctgtgcacagcgattgagagtcagaattcagctctgtctcactcagtgtcaacatcctcagattctgccatttatagcctcccacagcaaataggattgagggctgcttctctgagctcaaggggatagaatggggaaccccatgagtactgcaacaaaactgtttgctggagacaagagctggtggctctgtgttgttctagtgacaggtggcctcatttcacagggaccccctcaccctatgtgccccatgtggctcagaaaagccagaaattgtctccactctcacaggggaaggtccctgaccccctctttgccagctgggccaaggcaaattggggtcacttcatggggtacaggacctaccctctcttggttgcccccaaggaggggatgtggaggggctggggacctggcaggaccagggtgtcttgagttaatttggggctgcctttagccgagggcttctgtgtgcctggcatcagctttacattgtgtcttgatccgtaaaacagccctgtgaggaaagatatttttaaccccatcttccagatgaggaaacggaggcccacagggtgacgtgacctgccaaggtcccctagccaagagtgacaaagccagggttcacacacagctctggacacaattcatcacccttcatccgtctctctctgactctttctttttccctctctctctttgtctctctttttttttttttttttttttgagacagcgtctcactctgtcacccaggctagagtgcagtggcgcaatctcggctcactacaacctccatctcctgggttcaagcgattcttgtgcctcaacctcccaagtagctgggattacaggtgcgtgccaccacacccagctaattttggggggttttgttttgttttgagatggagtcttgctctgtcgccaggctggagtacagtggcgtgatctcggctcactgcagcctctgactcccaggttcaagtgattcccctgcctcagcctcctgagtagctgggactacaggcatgcaccaacacgcccagctaattttttgtattttagtaaagacggggtttcaccatgttggccaggatggtctcgatctcctgagctcatgattcgcccgccttggcctcccaaagtgccgggattacaggcgtgagccactgtgcctgccaattttttgtatttttaacagagactgggtttcaacatgttggccgggctggtctcgagctcctgacctcaagtgatctgcctgccttggcctcccaaagtgctggtattacaggcatgagccaccatgcccagcctttgtctcttttattcttgtgttctctctctctcttccttctctttctccacctccttctccttctctcccttctcctcacccttctttgtgcttttctctgtgagtttctcttcttctctatttctctcctttggtgaatgtcaattagaaaagcagaaaaactgcgtttaatttgtgatcataaatgcatgtccctggccaggcgtggtggctcacgcctggaatcccagccctttgagaagctgaggcaggaagattgcttgagaccgggagttcaaaaccagcctggtcaaaaagcaagaccccatctttaaaaaagaaaaataattaattagctgggcatggtggtgtgtacctgtagtcccagctactcgggaggctgaggaaggaggattgcctgagcccaagggtttgaagctgcaccgagctgtgattacacccctgcactccagcctgggtgacagaaccagaccctgtctcaaaaaaaacctaataattaaaaataaataaataaataaatgcgtgtcccctggccagtggttgctaatgtttggaatcacctttgacccatgccctttttcattcatagatgtttgtcttgaccaaaatcaaagcattagactttggactataaatcactggttcattcaacaaccatcattgaatgcctactgtatgcagacactcttctggacacagaggagttgacgtgttggtggggaaagccagtgatcagttgggataaaaagggcagacagcagacattaaatagtttaggctttgtgggccagatggtctccatcgcaacgactcaatctgctcctgtagcgtgaaagtaacgacagataaagcgcgtaagtgaatgagcatggctgtgggccaattaaacgttaacctataaaaacaggtggctggcccgcgggctgtagtttgtggatcactgccttagagatagtgttagagggtggtgagaggtccgggatagaataaaacagtagagagtttgtgcattgtcaagatgagaggttgcagttcttcttatacaccccgaatggccgggcaccgtggccattatgatctataattctaacactttgggaggctgaggcaggaggatcccttgagccctagagtttaagaccagcctaggcacatagtgagaccccatctctacaaaaaaaaaaatttaaaaattagctggacatggtggagcatgcctgtaggcccagctacttgagaggctgagatgggaggactgcttgagcctgggaggttggggctgcagtgagccgatcatgccactgcactccagcccggatgacagagcaagaactgtctcaaaaaaaaaaaacaaaaaaacaaaaaaaacagacctgaaggaacaaatcatatgaatgcattaaagtatcacatgtatccaaaaaatatatacatctatcagcctggcacggtggctcatgcctgtaatcctagcacattgggaggccaaggcaggcagattgcctgagctcaggagtgcaagaccaccctaggctacatggtgaaaccccgtctctactaaaatacaaaaaattagctgggcatggtggcaggcgcctgtagtcccagctacttgggaggctgaggcacaagaattgcttgaacccaggagacagaggttacagttagccgagatcgtgccactgcactccagcctggacaacagagcaagactctgtctcaaaaaaaaaaaaaaaaaaaaaaaaaaaaaaatatatatatatatatatatatatatatatatatatatatatatatatataatcaattaaaaattttccttaataaataaacatttctctccttctctcccttggtgaatgtcaattaataaagcaacaaaactatgtttagttagtgatcattaatgtatgtccctggctgggtgtgatggctcacacttgtaatcccagcactttgggaggctgaggcaggagaggatagtttgaggccagcaattgcttgaggctttttgaaagacatgaaggagatgaagggagccatggagatatctcagggaacagcagccgaggtagatggaacagccagtgcaaaggtcctgaggcaggatgttcctggcatttgtgaggacatgtagctgcccagatgtccagtggggagtgagtgaggatgaaggaaggagctgatgaaggaagatgataaaatacttcatggatcagccaggcatggtggctcccgcctgtaatcccagcactttgggaggccaaggcgggtggatcacaaggtcaagagttccagaccagcctggccaacatggcgaaaccccgtctctactaaaaaatacaaaaaagttagccaggcgtggtcatgcacgcgtgtactctcagctacttgggagactgagactcgagaatcgcttgaacccaggagatggaggttgcagtgagttgagatcaccccactgcactccagcctaggtgacagagcgagactctgtctcaaaaaaaaaaaaaaaaaaaaaaagacttcgtgaacagacagcctatataatttatgatccaaaccaggacagttttgagagtgaaaggggaaaaagagcactgaaaaaataattagcaggcctggcatgatctataacgggtataaagtgggacacacagcctctctcacggtcactgtcagacttcagctttttcacactcaaatccacccccatgtttatcccatatactggagaaacgggtgttctcctgagctgagttttggggttttttccttttgttttgttttgtttttgtttttttaacatcctgtatactttttctcaatgaaccatgctcaaaaaaattagaggaaaataaaccataaaacagaaggcactgaaggattttgctgggactcagccattagtttgtttgatgagtatttatggagcgctttctaagcaccaggcaccaccagcgatactgggatgaatcagtaacatccctcacccttgaagctctcttgggcccattgttatttacttaaaatactatgcaagtacggagaaggggtgaagtgggaaaaaatcagttggttgtaaaggccagaatgacgggtctagtcccacccatgccatctgcaccctgtgtgatccaggcacatcatgttgcctctctcagcttcagtttctccatccaccaggcacagagatggcgggaatcgaggaagatgtggggagtatttcatcagcccaaaaagacttggctaatgcgaccataattctgccttctgcctctcctttcccagaaaaatagcttaatcatttggatttgggataaacacatttcctgtgtttattatttaaatgatccaccaagctgggcatggtggctcacccctgtaatcccaactctttgggaggctgaggagggcggattgcttgagcccaggagttcaagaccagcctggccaacatggcgaaaccccatctttactaaaaaaatacaaaaaaattagctgagcgtggtggtgcgtgcctgtaatcccagctacttgggaggccgaggcacaagaatcacttgaacctgggaggcagaggttgcagtgagcctagatcgtgccatcacactccagtctgggcgacagagtgagattctgtccctaaataaataaataaataaataaataaataaataaaataaatgatccaccaacaggaaccccaggaacatttgtattgactatgcaactaatgcttagtgagcacctactatgtccctggtgctgatctggacactgggatttagacaggaaaaatctctaccctggaggagctgatgatcaagatgacaatcttgaaatgcataagttgacaagatgattcagacagtggaacgtgctgggaagagaatgagatgtctggctgagctgcaggaaggggcaagtccttttgattgagaggtccaagaaggcttctctgatgggggcacaatggatctaaggttgagtgataagaagaaattggccaagccaagacctaaaggcagagttgctccaggcataggttcagagaatggaaataattggctgattgtgatcttgaacttgacctttcttttcttctgctaactttgggtttggtttgttcttgcttttctggctccttgaggtacgtgttgggttcttaatttgtaattttttttttttttttttgcttttttgagacagagtctcactgtggtgcccaggctggagtacagcagcatgatcttgactcactgcaacctctgcctcctaggctcaagtgaacctcccacttcagcatccccagtagctgggactactggtgcacagcaccacacccagctaatttttttatttttattttttagagatggggtctcactgtgttgcccaggctggtctcaaacccctagctcaagcgatcctcctgccttagccccccaaagtgctgggatgagaggcgtgagccaccacatctggcctctgttttttgtgatgtaggtatttgatgctataaacttccctcttagttgcttcttggccctttagctaaggtcaagtgtaaacttccctcagcactgcttctgctgcatctcacaggtgttggtgtgttgtgtctctattttcattcatttccaaaattttttaagtctccatcttaatttctgcattgacccaatggttgttcaggagcatgttgcgtaatatccatatatttgcatcatttctgaaattcttcttggtattgatttctagttttatcccacggtagtctgagaagatgcttgacagaattccagtattttaaaatttgttgagagttgttttgtggcctaacatgtggtctgtcttggagaatgtccatgtgctgatgagaagaatgtatgttctccatcagacatgcaagagacagacactttctcacctgcctcatgggatccataaaagagtcaatcagaagttggcatttaagaaagaccagaaggaggctgggtgcagtggctcatgcctgtaatcccagcactttgggaggctgaagtgggtggatcacctgaggtcaggagttcaagaccagcctgaccaacaaggtgaaatcttgtctctattttaaaaaatacaaaaattagctaggtgtggtggcgggcacctgtaatcccagctactctggaggctgaggcagagaatcacttggacccaggaggtggaggttgcagtgagctgagatcacaccattgcactccagcctgggcaacagagcaagaccccatctcaaaaaaaaaaagaaagaaaaaaaagaaagaaagaccagaaagaggtgaaggagcaagctacagagatatcaaactgtatcaatctggctgggcgtggtggctcatgcctgaaatcccagcactttgggaggctgaagcaggaggatcacttgagcccaggagttcgagaccagcctgggcaacagagaccccctctctacaaaatataaaaatttaattaaaaagatgtattggtcagggcagccaagttatgctgcagtaacaaacatccccaaagcctccatgacttttgacaacagatgtatttcctgctcatgctacatgtccagtgcaggttggcagtggggaagaagggggctctgttcagtgcagtcacttgagacctagctaatcacctagaacattgccacttgctattccagaaggaaaaaaggaatgctagaaggtcccacactgaaagttcaatgctctggctccaaaatgacagctatttccactcactcctcattggccagcacttagcatgtggtcctcagccaaccccaaagggactcaggaaggaccatcccaccatattgctggaaatatttgatggcagcattaatggggaacagtgttccaggcagtggaagtctttgagcccttggaagaaagacaaggcgatctctagagcacatccttcccaatattaatgaatttaacaaatgagcaagccatcctcccccactctccttcccgaattcagacttgtgcatatccctcccttaacttgaactgccaaagaagagatgagaaccaggagaagagatctgtgaccccatctttgctgatgaactaccacagaacagccatggcatctccagtccttgtgcttgtaaaatgtacttttcattttgctcctgaacgaaatccacccacccccacccccaaaccagggaaagctcatctcctaatccaaaactgcacccagccttccaccaccttcttccctgggaattgttgattccagagtatggaattgaataattggatgagtttggaagagaaaaagtgtctctaaaatcaggcagcagaagcccactccccagagaggatggtgcagatgagagttcaggagggagcttggcttggggttgacgatctgagctatgcagggaacttggacacacctctcaatcagtcattcaacagacaccacttattgagcaccgactgtgtgccagatgttgtcctagggggctgggaatacaggaatacagcagggaacaaaaaggacaaagcccctccctcttgtcgaatggacattccagccaggaagacgagagaacaagagaaataagtaaagtatataggcggtgaaatgcaaatgggaaaaaagaaacaatggggaccagaaatgaggggtgcaattgtaaagggccatcaggggaggcctccctcagaaggtggcatttgagtaaaaaacctgaaggaggtgaggggaaaccatgtagcaatctcaggaaagagcattccaggcagggagggacagcctgtgcaagggccgaggtaggactgtgcttggcgtggttgagaaactgcaaggaagccaggtggctggaaccgaatgagcgagggaaaaggggaggagataaaagcaaggagatgggagggttggaggccccctctgccattcagtaactgagtaacttcatttatttcctgtagcttgaaccacaaagaaccacaaatagagtagctgaaaacaacagaaatttatttattctctcgcagttcaggaggccaggagtccacagaccatcaaggtcagctgggccacagaccatcaagatgtcagctgggccatggtgcctcctgagacttggtctgaaatcccttcttgcctccctcctagcttctggtggtttgccaacagtgcttggtggtccttgtcttgtagacgtatcaccctgatcccgccttcatctccatttcacatggccttctccctctgtgcaaggttgtctctgtgcccaggtttctccttttcttattatttacttatttgtttgtttgtttctttattttagacacagggtcttgctctgtctcccaggctggagtgcagtggtgcgatcatagctcactacagcctcaaactcctggcctcaagcaatcctcctacctcagcctcctgagtagctgggactgcagatgtgagccactgtgctctgcccagatgtcctctttttataaggaaacccgtcatttaggatgaggttccaccctaatgacctgatcttaacttgattccatctgcaaagaccctatttccaattcataggtaccagggattaggacttcttcaatgcatctttttggagagacccactgcaacccacaacagaactgtgggcatgtaacttgacctctcggccaggcgtgatggctcacacctgtaatcccagcactttgggaggccgaggtgagtggatcgcctgaggtcgggagttcgagaccagcctggccaacatggtcaaaccccgcctctactaaaaatagaaaaattagctgggcatggtagcaagcacctgtaatcccaactacttgggagggtgaggcaggagaattgcttgaacccaggatgtagaggttgcagtgagccaagatagtgccattgcactccagcctgggtgacagagtgagactccatctcaaaaaaaaaaaaaaaaaaaatagacctctctgtgcctcagctttctcacccgggaggatggggataattatatacccactcctggggttcatgagaggattaaatgagctcaaacagtccaagcctccacgtgtgtctgttgtggtgctgggtagcatgtcctgtggccagaggttcccaagcttgtcgaggacccaggcaagggcagattcgggtcttgttggcagcacctgagatggacgggctgccttggtatggaagggcctcggctgtttttccctttcagtcctgtccctctcccccatcctccaccctgtccctgtcatctgagcctgctcctcgtgatggctcagagtctccctactggcggccggtgcagagtttcgttccctgggctatatttagccctgagaaatgggaacgagaaccctcagccgccaaagtgatggagagaggagcacaaagccagtgctgccttctgtccagcaatgttccgctgactcggttctttcttccagaaccttccagaagcaaagcattggcatttctgagctcgttaaaacaaggatgtgggctggtggctggcacattcattgtccccagaacctgtctgtgtccatgattaaagctgactttgttagttttattttcagtgcttttttttttttttaatccatggcaaaacacacatgacataaaatttaccatcctaatattttttttaactttgtaacattttttaattgacaagtaattgtacttattcatggggtacatagtgacgtttcaatgcatataatgcgtagtgctcagatcagggtaattagcatatccatcttctcagacctttattgtttctttctgttaggaacattcaagctcctccttctagctatttgaaaccattaatatattgttgtcatcctaaccatttttaaggatacagtttcgtgaaattaagtataatacattcacattgttgtgcaactgtcaccaccatccatctcccaaacttttccatcttccaaatgtaactctgtccccactaaacgcgaactccctgttccccctcccccagcccttggcacccaccatgctactttctgtttttataaatctgacgactctagggacctcctataaatggaatcatacaggattttcccttttatgactggtttatttcacatagcataatgccctcaaggttcacccatgttgcagcacgtatcagcattttctttctttttaaggtaaagttgactattaaaaaaaaacttctgccgggctcagtggctcacgcctgtaattacagcactttgggaggccaaggcaggcagatcaggaggtgaggagttcaagaccagcctgaccaacatggtgaaaccccatctctactaaaaatacaaaaattagccaggcatggtggcgggcgcctgtaatcccaactactcaggaggctgaggcaagagaattgcttgaacccgggaggcagaggttgcagtgagctgagatcatgccactgcactccagcctcggcaacagagtaagactccgtctcaaaaaaaaacaactttttaagaattgaagtagaataaacatacagaaaaatccgcggattataagtgaagagcttgattaattgtcacaaactaaacacatccatgtaaccagcacacaaatgaggaaacagaaacttctcagccccagaagcccccctcatatcctgttcctagtcactacctccccgcaagggtacccctaccaggactttgagcatcattcaccagtttagcctgttttgtattttgcataaatgaagtctggcttcttttgcttgacgttaactttttaagatctcatgtgacctgtggcattgttcattgcatgtatcctctctctcctattgataacagtgtggattgtttgcaatttggagctatgatgaataccattgctatgaatgttcttgtgtgtgctttctgttgtgtaattattcagaattactatttcggaattactatctaattgtagtgatcttggatcagtaactatccaagaattactgggtgttggcaaaggtacatacagttatacactgcacaatggcattttggtcaacaacagatcaaatatgtaacagtggtcccataatggaccgaatacataacagtgattatcatacagtatttttactatagcttttctgtttttagattcttttttttttgagacgaagtctcgctctgttgcccaggctggagtgcagtggtgtgatctccgctcactgcaagctccgccttctgggttcacgccattctcctgcctcagcctcccaggtagctacaggcgcccgtcaccaggcccggctaattttttttgtatttttagtagagacggggtttcaccatgttagccaggatggcctcgatctcctgacctcatgatctgcccgcctcggcctcccaaagtgctgggattgcaggcgtgagccaccgcacccggcctgtttttagatatttttagatacactatagagttacaattgcctacagtattccatagaataacatgctgtatgggtttgtagcctaggagcaataggcgagaccatgcagcctaggtgtgtagtaggctataccatctaggtttgtgtaagtacactccatgatgtttgcacaacaaaatgacctagtgacacatttttcagaatgtatgcccattgttaagcatgacttaattttagcatagaaactctcaaccaatttttcaagtagttgtaccatgtgttatgggttttattgtctcaccccaaaattcatatgttgaagtcctaacccccagtacctcagaatgtgaccttatttggaaatagattcattgcacatgtaaaggttttgccattggcaaaactgccgttatttttgcaccaaccatagcagttaagatgagatcattagggtgggtcctaatctaatacgatggtgtccatataaaaaggggagattttggcacagagacaggcacactcacaggaagaatgccatgtttaaacaaaggcagagctcaggatgatgcctctacaagccaagaatcagcaaagattgccagcaaaccgccagaagctaggagagaggcataaaacagattctgtctcacagctctcagaaggaaccagcccttctgacaccttgagcttggatttttggcctctataactgtaagacaataaatctttgttgtttaagccacctaggttgtggttccttgttacagcagccacaggagatgaatacagcatggtgccctcccattggcagattatgagggttccagttgctccacagcttcacagacacctggtagtaatgacctcatcttaacttctttctcattttagcctttcttccaggcagcagcagtgtcatacatgcttttaaaggtgggcttttaaagccacacttgagagccctgcattctgcaggtgtcacagggtgatcaactattcaaaggctacccctgccctgacagctggaggcaaggcttcccagcacagaggttaagcccatggactctggggccaggtggttagtgcaaatcccatgtccactagtgaataactctgtgatcttgggctgatgattttgtctttctaagcctcagtttcctcaatagtaacatgggcattataacatagaggcatcatgaggattaaatgactaagtgagctaacatacataatgtgcttaggaaggtgccagcacaccataaatactctgtaagtgctggcttttatcattcttttctctctctctctctctctctctctctctctctctctctctctctccctctctctctctgtctctctttctctctccaccccccaacctcctctccttgattttcttcccctcatcttacttccttcttgctatagtgttctattttctgtttcagagagtattctatttgtggacttttttcctcttgaaaattgagctgaaacttctgagaattttttgtgattggcattaaggctgcagggaatggagcagggagacacttgaggaaagggctcatggaccatctgtctggcttggtgatttcaccaggccatcagactctgtggtcatgcatctcctctaaggggagtctatgactgtgttgggagaagagaaggaaccagggattaattaatccatttcaataggttttgtgttttgtttggtttactttttccttctccttctggactgtggtctgggaagtcctcttgtgtttcttactccattcccaggtcaattatgttatgtgaggagaacataattaagagagagctttaccctttggatgttttcttcagaaaacgttcctccatttccccctctgggatgccagagccccagaactccacaagccaagaacatttaagacagagccacaagagaaccgagcttccccttccctcacctgtcaggttctatctgagtcccagtcaactctcacctgctttccctcctcacaccctacagagcaacgatgcctcagggaacacttggaactggttgtacttcatccccctcatcatcatcggctccttttttatgctgaaccttgtgctgggtgtgctgtcagggtaagtttctgctactccccaccccatcccactcactcctctttgctaacttctttccaagtagaggccattgaagctttgttttcattcactagacagagaaaaggcttcttcccttgtttgggttaccagactgttattagcaagccatgcacaggtgcagaggttgtgtactgctaggggtacccagtgagagggttcatatgggctttactttctttacattttttttaaaaaccaatagtttgggtttacttctcccccattttccaaatataaaatcatagcatatgctctaacggtgtattttcctgacccatattgtcctctatccccaagatttttttggcttaatcataaatgggcttcatttttcttaccataagaagtctgggcacttgtatggtggctctatggcaccatcagcaaccccagattcttccagctttccattctgacatctttaccagaggcttccaatctcgtggatacctcatggtcttaagatggctgcctcacgccctccggatggccacttcatgttccaaacaggaaaaggaagaagggaaacaggaagaggtgggacctatggcagagaagccaacctgctgcagaaatctttcattcatggcttattggtctaacttaaaagagggctgaaataattattagccaaaagtatgaagagaatgagaatgaggtatgcagccagtggtggttggcatggcatggttttatcctttcggtttttttcttttttattgtttttttttgagacggtgtctagctttattacccagactggagtgtagggggcgatcatagctcactgtaacctagaactcctaggcacaagcgatcctcctgcctcagcctcctgagtagctaaggcaacaagtgtatgccaccatgcccagctacattttttatttttcatagagatggggcccactgtgttgtccaggctggtctcaaattcctggccttaaatgatactcccatctcagcctcacaaagtgctgggattacagacatgagccactgtgcctggcctttttctttacctaggcacagttgtcgggaaatgtgtgaagctggcagaagcacccatcactataatatcccagtcttttcccagaagtcctgactcctcctgttgaaaactcctgacctccagggacttctgaatccccaaacacacacacacacacaaacacacacacacacacacacacacacacacaaacacacacacaaacgtttcctaacattttcaaaacagccatactctggcttttctatgcttctccagggagtttgccaaagaaagggaacgggtggagaaccggcgggcttttctgaagctgaggcggcaacaacagattgaacgtgagctcaatgggtacatggagtggatctcaaaagcaggtgaggccctttcatcctggggcccagggatggagatcccaggccacggagtacaaagagagtcatgcagtttggagaaggctaagctgggagggttatgatgggaggagaaagagaacctgaattggtagtcccaaattttatcaacaagaatccagagtctgatatgaagaagtctaagatgaagccaggatctgacatcacgtaacttgaattctgaaatcagacgctggtttacatcccggccctgccactttttacccatgcaccacacatccctgtacctccgtttcctcagctgttacatggaggcgatggtagtgcctaagtcatagtactattggagtatttagtaaaataatctcagctgagtcacttggggagagaagtgcctgatacacggtaggcacatatttatttgttcagccatttaacaaacatttagggagcacctgctgtgtgccaggcactgatctaagcactgaggatatgggagtaaacaatacacaccaaatccctgccctcagagctctgatattctaatgagagagataaagcaaacaaatacatgtcatgttgggaactcccaaattcagagaaggaagataaaacagactaggaagataaaacagagtaggaagttggccgggcgcggtggctcacgcctgtaatcccagcactttgggaggctaaggcgggcagatttcctgaggtcaggcattcgagaccagcctggccaacatggtgaaaccctgtctctactaaaaatacaaaaattagccaggcatggtggcgcacgcctgtaatcccagctactcgggaggctgaggcaggagaattgcttgaacccaggaggcagaggttacagtgagctgaggtcgcaccactgcactccagcctgggcaacagagtgagactctgtgtcagagaaaaaaaaaagagtaggaagttagaggcagggtggtcagggaaggcttctctaaggaagtaccctctgagcagagagacctgaaggacgtgaagaaggaagctgtggggatgtcaagggaaggggcattccaggcagagacagcaagtgcaaaggccctgagctaggaacgtatttgagacacagcaaggaagccagtgcagctgaaacagagtgagaggtggggacagctggaggagaggaagacaggaaggtgatggagatcagatcaagcaggggcttataggctgtggtgtggacattggtttttattttgcgcgaggtggggagaatgttggctattgctactgttgcggaggtggggcttgaagtcacaaaccacccagcagcatgttttttggtcggttgagctgtcaccatcagtcagcagagaatgggggtggccgggcagacccttcttcctggtccaagggagaactcatcctccaaatgcaggagcttaactctgtgctcttcctcttcagaagaggtgatcctcgccgaggatgaaactgacggggagcagaggcatccctttgatggtaactgctctaaacccacctcaggggtgggtcccaggggagaagggagaagctgtggtggggagtcgggggagagcaggtgactggttctaaggatcttgcagagggtagacgttcctcttggaggaattttaggacttccatgcagagtttccctattctggcctccacttttttgttttaaccatggacctggttttttctgctttgtgccttggtttttctcatctgcaaaatgggtatgatataaacaataccctagctcacgagattgtttctcagaatgatattcgttatggcaaatagaacacctgggatagtgcctggcatggggtcagcacgtttctgtttgctaaataagtaataattccaccaataatccagtttactgtgaacggctgctgtctcccatgttagaaacttaacgagacagaaccatgactttctttcttttcttttttttttaattgagacagagtctcgctctgtcacccaggctggagtgcagtcacacgatctcacctcactgcaacctctggctcccaggttcaagcaattctctgcctcagcctcatgagaagctgagattacaagcatgagccaccatgcctggctaatttttatattgttgatagagatggggtttcgccatgttggccgggctggtcttgaactccttgcctcaaatgatctgcacaccttggcctcccaaaatgctgggagtgtagatgtcaattcatggtcccctggaaacctgaatatgaaaggagggaccattaaaaaggtgtccaaaagcccaacctccccagcatagctgggagtcaggggacagactgtaagagtcactgtgtatccaacctgaggcttcatgaaagtaaagtttcctagaatttagagatagggttggatgcggtctgtctgtggctcacatctgtaatcccaacactttgggaggccaagacaggaggaacacttgagcctgggagttcaagaccagcctgggcaacataatgaggttccgtctctacaaaaaataaacttagccagatgtgggggcacacgcacctatggtcccagctactcaggaggctgaggtgggaggatcacttgagcccaagaggtcgaggttgcagtgggcaccactccactccagcctgggtgacagagtgagaccctgtttcaaaagaaaaaaaaagaatttagagataggccagaataatatgtctgcaatataataataacagcaataagaaaaataatagtactccctgaaaaatgcaacttcttgcttgagatttatcttctcatactttagaaaactggttagacaggggctgggcgtggtggctcatgcctgtaatcccagcactttgggaggccaaggcgggtggatcacttgaggccaggagttcaagaccggcctggccatcatggcgaaaccccatctctactaaaaatacaaaaattagctaggtgtcatggcacacgcctgtaatcccagctactcaggaggctaaactacgagaattgcttgaacctgggagacggaagttgcggtgagccgagatcacaccactgcactccagcctaggcgacagagcaagactctgtctcaaaaaaaagaaagaaagctggttagacagggtgatgacttttgattaaaaatctgagagatttgagggaaataaaagaactggcactgcgtcccagaaggttataaaatgaattttattatcttagttggggaggggagattacctaactcccctaaatgagttaggtaatctaactcatttagggtacctaaatctttttattggaagtctacacctgaacttgtctgctgtggagcccctggggtgtatagcttgaatatgggggcagaatcccaaaattgcagcctgcctagcgagtatgctacaggtcaaggggtggactgttttcataagaaagtgaggtttcttagaatttaaaaatagaggctgagtggggcggctcacgcctgtaatcctagcacttttggaggccaaggcaggcaaatcacttgaggtcaagagtttgaccagcctggccaacatggcaaaaccccatctctactaataatacaaaaattagccaggcgtggtggtgcatgcctgtagtctcagctactcaggaggctgagggaggagaatcgcttgaactcaggaggcagaggttgcagtaagccaagatcacaccactctctgggtgacagagcaagattctgtctcaaaataaataaacaaataaataaataaaccagaaggaaaatagtggctgagggcccagacctggagtcggactgaacccgacttgattcttgtctttacccctttaagcaaagtgatagtgccaccttgaacctcagtttacacatctgaaaaatgggtatactattagttcccgtgagaacagttgccgtgagagttaaatccaaggacacactgtgtccatatggtctgtgttgcaaaaagggtaacgtctttttctcttgccatgtttccattgttggagctctgcggagaaccaccataaagaaaagcaagacagatttgctcaaccccgaagaggctgaggatcagctggctgatatagcctctgtgggtgagtcccttcctctgccacctatcagttgttcatcacctatcgcccaagagacatggtggggtgggggcagagggcttgcaaaccgtgctgcctggatttgggtctcagctccaccctttcccacctgtgcgtgtgtcctgggcagattacatcattatgggaataacatccgtgcctagcttctcattattttgtgggaattcaactaaatgatccccatgaagcatggcaaaccagcacctggcagggacgaagctcccagtcaagttggtgaatgtttgtgactcattcgggaagtattcatgggggacctgcttatattaggtgcttggttgcaaacaagacaaggcagtcacgaggctgagctgggaggatcacttgagcctgggaagtggaggctgcaataagccattattgtgttactgcactccagcctgggcacagaaaaaaaaaaaaagacacaaactgagccaggcacagtggctcacgcctgtaatcccaacactttgggaagctgagatgagcggatcacctgatgtcgggagttcgagaccagcctggccaacatggtgaaaccctggctctactaaaaatacgaaaaaaattagcctgtagttccagctactctggaggctgaggcgggagcatcacttgaacctgggaagcagaggttgcagtgagctgagatctcatcactgccctccagcctgggcaacagagcaagatcctgtctcaaaaaaaaaaaaaaaaaaaagacacaaaccaaatccctacctacatggagctcacagtccagtgcaggaaatagaaattaaacagagaattacacaaataaacctgtaatggtaatggcacttcagggagaggctctgggcttagcttgctctagaaggatggggagcagtcagggaaggctacctggaggaagtgacggttaagctgggaactgaaggatgggtaggagatcactgtggtggtgatagcagaaggaacagtgtgagaggcagggctcagacctttgccaccacaagggccagagttcgagggaggagggaacatttattctttcccttctcactcctctgtcctattgattcattggctgtgatgatgttgattttgaccttctaaagtgagaatgtattgttattgttgttgttgttctttaatgggtttttgtttttaatggaaggaagagcatccaggcagaggaaataagactggaataagattgaggggagaaggaatttaggctgcttgggaaactgtgtggccgcagtttagaggaagaaaggatggcaagagaaagaggaagggaggaagagaaggagggagagaagtgaaggaaggagggaagttagtacatccatgtgtttctgatccatagtttctgatccactatttcgtattccccttttatcgctcgcccctagtttataaccttattgctgagtttaggcataatttccattgcgatcacatatctcgtagggtggatacactatggtttgtttagccatagctctattatagggtgtttgagttgtttccaataatttctcttacgaagaacactgctgtgcacatttacgtacaatgactccccccaccctttgggcgtatttccttggggataattataggatcaaagatattaacagcttttcaactcattattcaaagagccattctgagtttcaaaaacatggaacccatttataaacctgccaagtatgcatatgttcatggattccccacccaggccatcgaatattaccaatttaatttcctttcccagttaagtgggtttgtaatgaaaccttaaagcttgttttcatttgcatttttaatttccagccaaaacacgcttttctttgtaatggagaactcattctgcttccactcgtgtgtgcatctgtttaatttcctgtaagcaaatgtcaagaattggagcgctcagtaggtgtcttgagtatttgatcaattatgtctgtctcacgtgttacgttacctccattgtttaaaatctgttttatgacgaggtacagtggttcacgcctgtaatcccactgctttgggaggccagtgcaggaggatctcctaagatcagccgttcaagaccagcctgggcaacataacaaggctccatctctgaaaaacaaaatgttgaaaaacttagccaggcattatggcacacacctatagtcccatctatttaggaagctaaggcaggaggatttcttgaacccaggaattcaaggttgcagtgagctatgattgtgccactgcactgcaacgtgggcaacagagtgagaacctgtctcttaaaaaaataaaataacatacattcttaaaaatctactttgctggccgggcgcggtggctcacgcctgtaatcccagcactttgggaggctgaggcgggtagatcgcttaaggtcaggagtaggagaccagcctggccaacatggtgaaaccgtgtctgtactaaaaattcaacaattagctgggtgtggtggcgtgagcctgtaatcccagctactcaggaggctgaggcacaaaatcacttgaacccgggaggcggaggctgcagtgagctgagatggcgccattgccctccagcctgggcatcaagagtgaaactccatcaaaaaaataaaaaatctgcatatacatatatatgtatatatatttttaatttttttaatttttttttttttttctgagatggagtcttgctctagcacccaggctggagagcaatggtgccatctcggctcactgcagcctccgcctctgttaacaaggcaggtgacattgcagctttctaaacagacccaaaacccaggccagtggcttgttctttcatagccacgtttgctacaggcaaatccaccaaaacccacctcatcagcctgattactcaaaaagacaaagaaaggagcccccaatctagccagtggttttctagaccaccccaaaagagatctctggaattccaggattctggcaaggaatcacatttagctttatttatttatgtaaagaatgcaacaatacaggctgggtgtggtggctcacgcctgtaatcccaacattttgggaagctgaggtgggaggatcgtttgaggtcaggagtttcagaccagcctaggcaacatagtgagaccctgtctctatcaaatattagctgggcattgtggcacacgccagtagtcccagctactcgtgaggctgaggtggatcacctgagcccaggaggtcaaggctgcggtgagccacagcatgcccctgcactccagcctgcgtgacagagacttcatctcaaaaaaaaaaacaaaaaaaagtaataatacagtaatgcatatttcaaagtaaggtgggagctatgtggtatttgcgttcacgttcacattataccacagtatgcacagtccttttttttttttttttgagacagtgtcttgctctgatgttcaggctggagtgcagtggtgcaggcatagctcactgcagcctcaaacccctggactcaagtgatcctcccacctcagcctcccaagtagctgggactataggtgtacactgctacactcagctaagttttttatattttttactagagatgggatctcaatatgttgcctaggctggtctcaaactcctggcctcaaacaatcctcctacctccacctcccaaagcagtgggattacaggcgtgagccaccacacctggcccacatgcagtcttatataattggtgattctactgcgctgttgaatcagttgataaacgcactataaagcaggttcattcctaattgatgaacttactgctgaaataaggaacttgaatcatttacatgaaaagttgagccatgttgctgaaaggatatcaatttttttttcttttttttctttttttttgagatggagtcttactctgtcgcccaggtgggagtgcagtggtgcgatctcggctcactgcaacctccaccttccaggttcaagcgattctcccacctcagcctccaagtagctgggactacaggtgcacaccaccacgccctgccaatttttgtactgttagtagagatggggtttcaccatgttggccaggctggtctcaaactcctgacctcaagtgatctgcccacctcagcctccgaaagtgctgggattacaggtgttagccaccgcgcctgacaggatatcaaatttcatttagactgcaggaatacgttcaagagatctattttgtacagcctggcgactgtattaataacaatgtattatatacttgaaaattgctcagagagtaggttttaagcattctcaccgtgagaaaagtgataagcatatgtaataatgcatatgttaactagctcaactgagccactccatagtgtatacatatggtcaaaatatcatgttatgcactataaatagatacagcctgtatctgtcaatttaaaataaatgaataataactttaaaaagaaaaataacagtatggctgggcacggtggctcacacctgtaatcccagcactttgggatgccaagacaggcttgaggccaggagtttgagaccagcctggccaacatggcgaaactttgtctctaataaatatacaaaaatcggctgggcatggaggcgggcgcctgtaatcccaactacttgggaggcagaggcatcacttaacctgggagatggaggttgcagtgagccaagatctgcactccagcctgggtgatagagtgagcctttatttatttctgtaaagaatgcaataatacaggcctggtgcggtggctcatgcctataatcccaatgttttggaaggccaaggtgagaggatcatttgaggctacaggcgcatgccacagtgcccagctaatacttgatagagacacggtctcgctatgttgcccaggctggtctcaaaaccctggcttcaaatgagcctcccaccttggcctcccagagtgttgtgattacaggtgtgagacactgtacctggcctgtattaaaaaaaaaaaaaagaagaagaagaagaagaggaggaaagaagaagaaggaagaaggaagaagaagaagaggaggaggaggaggaatgggaaggggaaggggaagaagaagaggaggaaggggaaggggaagaagaagaggaggaggaaggggaaggggaagaggaagaagaagaggaagaagaagacgaagaagaagcacaatgataaataagtaaaatgtggagcatatgaaaacaaaacaaaaaaaagttgatccattatgaatggaagctgccattgtaactctgcttttttaggaaaaccagaccccatttagatgattttatttgtttttaaaggcaggttcttgctctgtcactcaggctggagtgcagtgatatgatcatagctctctgcagcctggagctcctgggctcaggcgatcctcccagcttagcctcccaagtagctgggactacaggcaccaccacacccagctaatttgttgttgttgttgatgttgttgttgagatggggtctggctatgttgcccaggctggtctcaaactcctggcctcaagtgatcctcctgccctggcttcccaaagttctgggattacaggcatgattttttattaatttatttgcagctgacaaatggtaattgtgtatgtttatggagtgcagtgtgatgttttaatctatgtatacatcatagaatgattcagtcatgctaattaacacatccatcgcctcaccacctcaccgttttttgtgtgtggggaaggcattaaaaatctcttagcaattttgaaatatgcaacacattactatttattaataatgcaatataaatacacaataatgtattaatgcatcactaaatgcgatgcaatgcaatgcaatgcaatagatcactaaaacttactcctccagtctaactgcaacttataccctttgatcaacatcttctccttctcaatccctcctcctcccctgcagcctccaggaaccaccttcctgctctttctatgagatcaattttttttagttttaagctcccacatgtgagatcatactgtaattgtctttctgtgccagcttattttactcagtataatgtcctccagttctgtccctgttgtcacacattacagaatttctttcttttagggctgtatagtattctatttgtatacataccacattttctttatccattcatccattgtgggacacttagtttgcttccatattttggctattgtgaataatgctgaagtgaacgtgggagtgcagatgttctgaaaagacttaaatgtcagacctgaaatggtaaagatgctccaagaaaacataaggagaaagctccatggcattggtctcgggaatgattttttggacaggacctcaaaagcacaggcaacagaagccaaaatggacaaatgggatcgtatcaaactaaaaaatttgtgcacagcaaaggaagcgttcagcagaggaaagagacaacctaaggaatgtgagaaaacgtttgcaaacaatacatctgataaggagctaatatccaaaatatataaggaactcaaacaactcaacagcaagaaaacaacccaattaaaaatgggcaaagacagctactcgggaggctaagatgtgacgatcccttgagcccgggaggaggaggttgcagtgagctgacattgcatcactgcactccaccctgggcgacagaaggagaccgagaccctgtctcaaaataaaaaataaaaatgtgcaaaggatctgaacatacatatcccaaaagaaaagacatacaagtggccaacaggtatatgaataaaatgctgaacatcactcatcatcagggaaatgcaaatcaaaaccaccattagctatcacctcacacctgttagagtagctattatctttttgtttgtttgtttgttttttgttttttgttttgtttttgagagggagtctcactctgtcacccaagctggagcgcagtgttgtgatctcagctcactgcaacctctgcctcctgggttcaagggattctcctgcctcagcctcccgagtaactgaaattacaggcacacgccaccatgcccagctaacttttgtatttagtttcactatgttggtcaggctggtcttgaattcctgacctcaaatgatctgccctccttggcctcccaaagtgctgggattacaggtgtgagacactgtgcccagcctagagtagctattatcaaaaagacaaatgaggtttgttgaagttctaacccctggtacctgcaaatgtggccttacatgaaaatagggtctttgcaggtggtaatcaagttaagatgagatcaaacttaattagggtgggtcctaaatccaatgactgctgtctttataagaggagaagcaggctgaccaacatggtgaaaccccatctctactaaaaatacaaaaattagctgggtgcagtagtgcacacctgtagtcccagctactcaggaggctgaggcaggagaattgcttaaacccaggaggtggaggttgcagtgagcagacgtcatgccactgcactccagcctgggtgacagagtgagactccatcttacaagaaaaaaaaaaaagacaaatcataacaagtgctggcaaggatgtggggaaacggggatccatttacatcattttaataacacaggctctatatgggtggtattgagttcccagagttgccattacaaaatgtcacaaacccagtggcttaaaacaacagaaatttcttctctcacagttctagaggccagaagtccaaactgaaatcaaggtgtcagcagagccaccacgttccctcagaaggttttaggggagaatctgttccatggtattttcttagtttctggtgctgccagcgatacttggtgttcctcagttcatagatgcataattccagtctctgcctctgttgtcatatggtcttctttctgtgtttctgtatgcgatttcttttttttttttttttttctgagacaagtctcactccatcacccaggctggagtgcaatggcacgatcacagctcactacaaccccaacctcacaggctcatgccgtcctcccacctcagcctcccgagtagctgggattacaggcgtgtgccaccatgcccggctaatttttgtatttttagtagatacggggtttcaccatgttggccaggctggtctcgaactcctgaccttacgatctgcccatctcggcctcccaaagtgttgggattacgggcacgagcccaccgcacctggccctaattactttatttttttgtaaatttttttttgtaaatttcatgtagcctgagcatacagtgtttataatatatacaggagtgtacaataatatcctaggccttcacattcactcaccactcaactcactccctcaccaagagcaacttccagtcctgcaagctccattcatgccaagtaccctatgcagctgaaccaccttttctcttttatactgtgtttttactgtaccttttctatgtttagatatgttcagacacacaaatactatgatgttacagttgcctacagtattaagtacagtaacatgctgggcaggtttgtagccgaggagctacaaaccacgtagcctgggtgtggagtaggctacaacatctaggtttatgtaagttcactttaagatgctcacacaaggacaaaattgcctaacaatgcatttctcagaacacgtctccctcattaagccacacatggctgtattacaatttacatataattttaagcgtatataaattgccagaaatcaccagatgaatccttggcggtgacataccccttcccccaccatagaacattgcagactggcccggacgcccagtatctcatgcctgtaatgccagcactttgggaggctgcagcgggcagatcacttgaggttaggagttcgagaccagcctgaccaacatggcaaaacaccatctttactaaaaatacaaaaattattcggacgtggtagtgggcacctgtagttccagctacttgggaggctgaggcaggagagtcacttgaacttgggaggcagaggttgcaatgagccaagatcgtgccactgcactccagcccgggtgacagaatgagactctatctcaaaaaaaaaagaaaaaaaaaaaaaaaggaaaagaacatttcagactggtaccagttacaccggctcttgatcccttgaatgtggctgaccctgaactaggatgtacttcataataacacgtccggctgggaatacttagtacaaaagaaagagtataaaatatcttttgaatccaccttgatattgattccatgttgaaatggtaatattttggatgtattgggttgaataaaacatctcatgaaagtgatttttaaaaatctagaaattgtctgcaattataattccagaccacagagaaaaacgagagacaggaatgtatagaaaaagggaacgtgggacaaagtgagtatgaaattcaactaacagaagtgacagtgcctagcatggggtccagcacttagtaggtgttcaattaatattcatttccctctcccttaccagtgaagggtatgcctgtcgtggggaatgtgtcttcaggctgagtgatcaggaaggactttctcaatggctggcacgtgaacctagtcatgatttcagctcttgaggttgtactagaagatttatatccaataatcgtaaggtaccacttagcatcacgctaagatgtattaattcatttatgcctttggatggccctttgaggtaggaagtgtggttgtctccagtttaccaaggtggcttgcccaaggtcatctgctggttggtgattaagccaggttttcagtgtggctccagcaggagtgggggctggggaccttctacctgctgtggtttctctctctctctctctctctctctctctctctctctcgatctgtggaacatcccccctgtcccccaaggtcccaagggtcttatttcttttggccaagccctttggagacctgcagatctggacacatctttgagagtttcaggaactagggccagaaatgctgggcagggtcatgaggagctgccactggggttgagaaggtgatggacatgaggggaagggtctttgcagaaaggagaggcgtccctgtaagcaggtcacagccactgggcctggccaactgcagccgagtggaatgtgcccctgccccatgaccatatgccccaggtgtgcaatgtggcggcccagagcacacactctgaaccatcttgacacatcttcactggttactagacccccctcagcctgtttccttggctgtaaaatggggatgacgctggtccctacttcctagggctctgagcaggagtaagtagcttgtcgtataaaacatgttccctgcagtgcctggtgcctgctaaatgttccataaacgtcagctgttattttcattcaggggaagctgaaatccatattttcatggaaaatctcccagtttttaaatgtggaccaataatttcagctttcacaaacccagtatgagtcggtatggcccctagggtgccaactcaaaatctctgttgagaattttgctgataggaagtggcctccttggaggtgtttgctgtgtcctgtgtctggcaagtggggtggttttgataaacgtgctggatggatgtatgggtgaatggataaatggaggaatgaatggagaaacaaatgagcaaatgaataatgaatggatggatgaatggatgagcgaatggatggatgaatggatgagcaaatgaatgatgtacacacaaaggaatggataaatgatgaatgtgctaatgaatttaagaatgatgaaagaatgaatgaataaatgaacaaatggatggatgaaagaatgaatgaatgtactaatgaatgaatcaatcaatgaagaaccatttaaaaatgaatgcaactgagggtttataagaaaaggtatcttaagcctgggcatggtaattcatgctggaatcccaatgcttagggacgctgaggcgggaggatcgcttgaacccaggagttcaagaccagcctgggcaacacagggagacctcattgctaccaaaaacaaaattgttttaattaagcgggcatggtggtacgtgcctgtagtcatagctacttgggaggctgaggtgggaggatcgcttgaacccaggagttcaaggctgcagtgagctaggatcaagccactgcattccagcctgggcaacaaagcaagatcctgtctcaaaaaaaaaaaaaaaagatgtattttagaaggtaaattcaatctgtccaaaactgagctctgaccttcccctaaacctgtgcccattcagtggatgagagctccatcccttaaggggttcaccaattcatccattcctttgtatgtacatcattcattcaccttggctcatccctctctcttacatccacaccgttccatcagcaaatgttgaatctgtcttaaatgattcatcccaaatcctccccgcttaactaccacccaactccagcccccatccatcatcatcatcacttgcctggatgggttcagtcacctccagcctggtctcccagctcccgtcctcacctctcactgtctactctcccactcggcagccagagggtgcctgtgaacacccaaatcaggttccatccctcctctactcagaaccctccacggctcccccctcactcagggtaaaagccaaagtcctccttgtggtccaccaggccatgcatgatctgcctgtcacctccctgccttcaccaccttcctcttttcccctcaaccactccactccagccacactgacttccttgtgctcttccccaaaaatgtcgggcagacacattcatgcttcaggaccttaaatttgctgtttcctctacctaagatactaaagtgacaagtcaacacactcaccttgaccatgcaatttaatgttgcagcctaccctgtggactctccaagggctcccagtccctctgtgatgctttactttttctcttaaaaaaaaaattgttatttaaaagaacttgtctcgctgtgttgcccaggctggtgtcaaactcctggcctcatacagtcctcccattccagcttcccaaagtactgggattagaggcatgtgccactgcacccatcccaactttttttttcccatagcacttttcattttccatcccactgttaatttacttattacgtccactgtctgtctcctccccttagagggtcagaccccggaagtccaggctctgttgcctaatgtatcctgagcccctggaacagagcctggcacaaaataggtactcaataaatgcataagagcaaaactatatgtaggcagaggacacacccagcttattcctcagtgatcacttctaaagttaaatgtccatggaaaacagtctcatccacatctctttctggaggccttccaagcgtgctccatgcagctctgttgcctgcccctgcatcagggaatggaggctctgctttatcctgccctgtggtgtgactcccagaggcatcagatgtggctgggagtgggagacatggaaaattggctcctgcaacagagaactatcagccttcccatcaattggttacttctaattctgttatttttcaggggcactgtcttctcataagctccatctatgcaaaactaagcccatgggtcatgatggttccctcaggccagaggcttgctggagagactaatggatcccctggctaaaatctgtgcttgggctgcacattggttaatttcttctgaaggaacagcctgagcctgacattctccatcttttccctggcaggttctcccttcgcccgagccagcattaaaagtgccaagctggagaactcgaccttttttcacaaaaaggagaggaggatgcgtttctacatccgccgcatggtcaaaactcaggccttctactggactgtactcagtttggtagctctcaacacgctgtgtgttgctattgttcactacaaccagcccgagtggctctccgacttcctttgtgagtatcacccagccccacccctgccaactccctgatccctccctcacaccctttttccacttctctttctctggtagtatgtgtatcttctttggtcctcattgaatctgccctttcctttagccatttctataactgtcactggggccaatgttactgttgctatgacaatggaacccatctcccttagacctgagagctggaagctggaattcagaccaacaaatgctcctgtgattcctttctaagagagagggacagaggggtgctggtgaaggggatgttggaagagagacagagaaagacggagctcataagatagacagatagaaacagaaacatacatgtattaataatttttatgtacatctctggaaatgttcataacttatggttaagagaggatgccttagaaataaggagtggcttatatgttgccctcattttctctacttatttctgactctacttctctcttctttcaaaccttctgcttctttcctgttaggttggtgcaaaattaattgcgttttttgccttttttttttttttttttaaccacagttacttttgcaccaacctaatacttcctcccctgccctttttggcttccttattcattcatagaacatcccctccagtatctgcgagagcgttttgctccctcaaggtacaaggcccactaaggctttgccctctgggcctattcccagattctatgtgagttagcatgagatagtatcaaaattgagggccaagtgagggtgaggaaaagcagcaaaagatggggagatgtctgagcaggatttaaaaagtaaagagctcgaggaatcaacaagagcagcgactggggccaggcatggtggctcacacctgtaatcccagcattttgggaggctgaggtgggtggatcacttgaggccaggagttcaagaccagcctggccaatatggtgaaaccctgtctttacaaaaaatacaaaaattagccagatgtgatggtgcacacctgtaatcccagctactcaggaggctgaggcactagaactgcttgaatccaggaggcagaggttgcagtgagccaagatcatgccactgcactccagcctgagcaacagagagagtgtctgtctcaaaaaataaagtaaaataaaataaaataaaataaagagtagtgattgggcagtgaggggggcaggtggatgccctggctttggctcacaggccccaagtaaggacttctcaaaacgtcttttgcctactggctgtctaatttattcactgaccttctgacctggttcagaattgacttaggacagcaagaagagacagtctagtctttgacctagaaaggcccgtgagcctagtccaggccattgtcttcttataaccctccttgttcccagtcacgttggctgaccccccaggacacccctcaggaaccagttctccttcccagggccctgacctagtttcaaacttagtaattgtttttagtccctctggagtctcttataaatgaggactctacttcgtgttttaacttcctctaatactctatttttaatctcctatattctctctactaatcatcttgtacagtctgtcctggttcaggaacaagggactgagacttcctgcctgggtcctcagtgtctataaaggtcctttactcattcccactttccctttgagaaaactgagacacagagaggttaagtagattgcccaggatcacacattagcttggcatgatggcgggcgcctgtaatcccagctacttgggaggctgaggcaggagaatcgcttgaacctgggaggcagaggttgcagtgagcccagatcatgccactgcactctagcctgggcaacagagctagacgccatctcaaaaaaaaaaaaaaaaaaaaaaagatacacattaatttcagagatgtcaaaatataaacaaaaatgtatatcttggcatcagtgaagtgtagttgtttctctggatctcagactccacatctatgtggtagaaaccggatttgatggtcctgaaagttcttccagatgcaacaatgctaaggataagtaattctttcaagtcttgtgcatcacctgctatcatgtttccatggtaactgaggaacaagatctcagaaactcttcagtcctcccagagttacttctggtgggtctaggaatgtgtcagatgttacaaacagacttcctctgctgatattttggtcctaggaaccctagagttcccctcagacactaagatctccttagcgtcctataaataaggagaaattttggtgataaatactgtgaaggactttgacggtcagttcaaaacacctcttaaaagcatgacatagcaaacacccttggcaaatatcttagttcatttgtactgctataacaaattacccgagactgggtaatttgataagaacagaaatttattttctcacagttctggaggctgggaagcccaagatcaaggcattggcaggtttccctgtctggcgaaagctactctctgcttccaagattgcaccttgaacactgtatcctctggaagggaggaacactgggtccttacatggcagaaggtggaggagcaagagggacaaacttcctctgtcaacctcttttataagggcacctaatcccattcatgagagctctaccgtaatgacttaatcacctcctgaaggccccacctcttaatactgttacattggcaattaagtttcaacgtgaattttggaggggacacaaacatttaaaccatcacaaccaccaaacacaattagctttgtggccttaattagctatatgaaattcatggaagttagtttcagtcctctgtctctttcctttctgtatgctttctgctcctcagaaaccctcctcatctctcctttctatccattaagtacccacgcccttcctaactcctcatcttcctaccctaccaagaaagccctctcagaaaaggatctgatgtcagccatttatttgctggagcaaatgcatatccatgttttacccctccctgaggcatttgcaattttatgcttgctcatcaaagaacaaaaggctttgtcttactcaagactttttaggtcactcacaacacaggatttctaggggacataagacaagttttctgagttaggagaaaagccataccttaggtgggttgcctgtgtcgctccaactaagtacttaacttcaggattacaaataggatatcattatgatttctatttccttttatcctttggagctcagtcacgtagaagtagattaaatataattgttagatcacagcaccctggcattatggggccgttatggtccattgttattatgtgaattattcagttaattagtttattttttaaatgtgataaacacccaggaacccaccagtcaacacaaaagtccttggcaataatctatatccgatccttctcatcgaaccagggcaaaaactacaagatggagacccactgatatttttctcattccttttaaaatcggcctaaggttggttagcttgttggttggagggtagggcataattgttgctttttttttttttttttttttttagacaaggtcttgctctgtcacccaggctacagtagggtggcccaatcttggctcactgcaacctccacctcccaggtttaagtgattctcatgcctcagcctcccaagtagctgggtttacaggcatgtgtcaccacactggctaatttttgtatttttagtagaggcggggtttgccatgttagccaggctggtctcaaactcctgacctcagttgatctgaccgcctaggcctcccaaagtgctgggattacagacgtgagccaccatgcccagccagctcttcctttttaacagaggggaaactgaggcccatgggaaggacaccttggacagggcgtggccacagtgggtcatgtatataatcccagcactttgggaggctgtgctgggaggatcacttgaggccaggagttcaagaccagccagggcaacatagtgagacccccatctccacataaaaattttaaaaagaaaaaagataagtcagaagttgggtgtggtgacacatgcctgtagttctagcatgttggaggccaaatcagggaaactgtttgaggccaggagtttgaaaccagcctaacagcatagcaagacctcatctctacaaaaaataaaaagtttaaaaatgataataaaaggaaagtcagagccacctggaacccctaccctcagcaagcctaacctcctctctgtttcctccttctcccttctagactatgcagaattcattttcttaggactctttatgtccgaaatgtttataaaaatgtacgggcttgggacgcggccttacttccactcttccttcaactgctttgactgtggggtaagtgctcttgtttctaagagttcatttctccagctcttgcctggaatgacagatacctggacacattaaagggagaaaggtaaagtcacccctgaatatgagagactcagatggatgcagaaggaatgagaaaacaatcccaaacactggcaaggatacagtgtacccagaaccctcaaccaccgccagtgggaggaaaacgtatagaccccctttggaaagctaagtgggggacataagacaagttttccaagttgggagaaaagccatgccttaggtgggttgcctgtgtcgctccaactaagtacccaacttcaggattacaaacaggacatcaatatgatttctatttcttcttttcctttgtagctcagtcatgtggaggtagatgaagtataattgttagattacaacaccctggcattatggagccattatggtcctttgttattttgtgaattactcagttaattaatttattttttaaatgtgattaacacccagtaacccactagtccacacaaaacctaagtcctggagaataatctacgtccaatccttctcatcgaaccagggcaaaaactacaagatggagatatgacccagcattccattgctaggaattcatcctagaaaatctcacccagatacctaggagacacaggccagaatgtccctgcagctggaagtgaaattaaggttgttcgcaaataagtggagaatgcctggcccagggcagccctaatcatttaccatagtcctgttggtctcagaaaggcttaataatttatttatttttttttattttttgtttttattttttgtttttgagatggagtctcgttctgtcacccaggctggagtgcggtggcgccatctcggctcactgcaagctccgcctcccaggttcactccattctcctgcctcagcctcccgagtagctgggactacaggtgcccgccatcatacctggctaattttttgtatttttagtagagatggggtttcaccgtgttagccaggatggtcttgatctcctgacctcgtgatccacccgccttggcctcccaaagtgctgggattacaggcgtgagccaccacacccagccagcttaataatttataataactgaatgttgtactgttttctgccattatagaaaattatgttgttggagaaaacaaaatacatacaaacaagcaaaccttccctacataaatgacccaagtagttaaagaataaaaccaatttctttccattaaaaagaaaagaaagccgggtgtgatgcctcatgcctatagcctcagctattcaggaggctgaggcagcagaattgcttgagcccaggagttgaaaaccagcccaggcaacatagcaagaccctgtctctacaaaaattaataataattagccaggtgtggtggtgcacacctgtagccccagctactcagaaggctaaggtgggaggattgcttgagcccagcagtttgaggctgcagtgagctatgatcacaccactgccctccagcctggacaagagagtgagaccccatctctaagaaataaaagtaggccaggcacagtggctcacacctataatcccagcactttgagaggcggaggcaggtggatcacctgaagtcaggagttcaagaccagcctggccaacatggcgaaaccccgtctatactaaaaaaatacaaaaattagccaggcgtcgtggcacatgcctgtaatcccagctacttgggaggctgaggaaggagaatcacttgaactggggaggcagaggttgcagtaagctgagattgcaccactgcactccagcctgggtgacagaatgagactccgtctcaaaaaaaaaaaaagaaaaattttaaaatgtcctgagcaaccttgtttgtaatagttccaagtctcaatatccgtgtatccctttgctgtagaacagataaatattttgtggcatatctatataatgaaatactctgtgacaatcaaagtccaccaacagcagccacatgcccaacaacaggaatgaatctcacccatgtaacatggcacagaaggaggcaggagctagcaacgtaagtccatacagttcatgcaaagttcaagtggacaaaattaaactctctctctctctctacatatatatatatatatatatatattttttttttttttttttttttttttttttttttttgagacagagtctcactctattgcccaggctggagtgcagtggcgcaatcttggctcactacaacctccacctcccgggttcaagccattctcccgcctcagcctcccaagtagctgggattagaggcatgcaccaccacccccggctaattttgtattttttgtagagaccgggattcagcaatttgcccaggctggtctcgaaatcctgatctcaggtgatccacctgccctggcctcccaaagtgctgggattacaagcgtgagccaccacgccccgccttaaactgtattttttaaggatgatacttgaatacgttaaaaaggcgaggaccttgaaaacacaacgctcggtaaaagaaaccaaacacaaaaggtcaagtattgcataattccatttgtatgaaatgtccagagcaggcaaatccatagagacagaaagtagattagtggttgctagggtctgggtgagggagagtggggagtaactgctcatggggacagggcctcctttgggggtgatgaaaatgttttggaacttgatagaggtgatagttgcagaatattgtgcatgtacctaaaggcactgaattgtgtaattcaaagtgtgaattttatgttatgtgaatttcacctcagttttttttaaggtaagaaaatggttattacaaaattcaggatggtagttatatcacagtgtctctggaaacttccagggtatccacatgtccctttttattttattttattttttattttatttgagatagggtcttgctctgttgcccaggctagagtgcagtggcaggatcatgaccctctcctgtctcaaattcctaggctcaagctatcctccctcctcagcctcctaagtagctgggactataggcacatgccaccatgcttgactaattttttttttttttgtaaagtcagggtttccctgtgttacccaggctggtcttgaactcctgggctcaagtgatctgcccacctcggcctcccaaagttccagaattacaggcatgagccactgccctagccttctcctaattgttgacataggtagtagttgcatgacattcactttgtaattatgtgtttcaggaattctcaggcctgtgggagctcttaataaataaaaaagaggccaggtgtggtggctcacgcctgtaatcccagcactttgggaggccgaggcaggcggatcacgaggtcaggagttcgagactagcctggccaacacagtgaaaccccgtctctactaaaaatacaaaaaattagccgggcgtggtggcgggtgcctgtaatcccagttacttgggaggctgaggcaggagaatcgcttgaacctgggaggcggaggttgcagtaagctgagatcgcgccactgcacaccagcctgggtgataagagcaagactccatctcaaaataaatgaataaataaaaataaataaataaataagaggccgggtgcagtggctcaatgctttggaaagtggaggccaacagttggagagaccaaagcaggaggatggcttcagcccagaagtttgaggccagcctgggcaatactagcgagacactatctctataaaaatgttttaaaattagccagatgtggtggggcacacctgtaatcccagctactcaagaggctgaggtgggaggatcacttaagcccaggaggacagtgctgcagtgagctatgattgcgccactgcactccagcctgggtgacacagtgagacccggtctctatagataaatgaatggatgaatgagggggtcaaggatcctcacccggcttccatttggagggaggagtttggttgagttcttgcaaggttggtacctaggaaatgcttgccagttctggagcccagacactgtccctggacatgagaccaggttctctgccctaggttatcattgggagcatcttcgaggtcatctgggctgtcataaaacctggcacatcctttggaatcagcgtgttacgagccctcaggttattgcgtattttcaaagtcacaaagtaagtctttggggttcctggacatttgtacagggggtggggatgggggacatggtggggccgcctccagaaagttgggaaagtgagcctcgtgtttcgagggctgactccggggccctgcctcccccgcctggcctgagtcctcgcctggcctctgtcggcaggtactgggcatctctcagaaacctggtcgtctctctcctcaactccatgaagtccatcatcagcctgttgtttctccttttcctgttcattgtcgtcttcgcccttttgggaatgcaactcttcggcggccagtaagtccttcacaggaattccaactcctggttccctggggtcaggctcagggaacacacagtcccctccaccgtgcaggctgccttcctcgtagcccagacacccattgcggtcacccaaatgggcagggccctgggtaccactcagggtttcctggggacagagatgatggagacgttcgtttccttggagatgagatactgagccacaccctcagagcaccccgggtggggccaacgtgaaatgtctgtgtcctccctgcaggtttaatttcgatgaagggactcctcccaccaacttcgatacttttccagcagcaataatgacggtgtttcaggtacagcctccacctggccccacgggccaacacctctcagtgtcacagatgaaagtgcctgctccacatccaaggggcttccctgaactcctccttctctacctggccttttcacaccactttgaaacacagattttatggttatcattattcaattatggtgaggccaacagatcaggagatgaatgtcattggaaagatagtttgtggctgggcacggtggctcacacccataatcccagcactttggccaggtacggtggctcacacctgtaatcccaacgctttgggaagcccaggtgggcggatcacttgagatcaggaattcgagaccagcctggccaacatggtgaaaccccatctctactaaaaatacaaaaattagccgggcgtggtagcacatgcctgtaatcccagctactcgggagatgaggcacaagaattgcttgaacctgggaggcagaggttgcagtgagccaagatcgcgccactgcactccagcctgggcaacagagtgagactccatctcaaaaaagaaaaagaaaaaaaaaaccactttgggaggtcaagatgggaggactacttgaggccaggagtttgagacaagtctgggcaacatagtgagactccgtctctgcaaaaaaataataataataattagctgggcatggtgatacatacctcctagctactagggcagctgaagtggaaggattgcttgagcccaggaggttgaggctgcagtaagctacaatcacaccactatactccagcctgggcgagagagcaaagccctgtctcaaaaacgaaaagaaagtttgttatactcacagatcctcagagaaggagcacaccatgcaggaccaagcagagaagcaacagggtcaagcaggaagagaaggaaaatgtgggcaagaggcttgattgtggtttccatgggacggaatgggtgaggcagagtaaacagctcgagactggctagtttggatcatttcagtgggctctggggcagaggagctgttcctacttgtctaggacctggccttggggtgattagggcaggtggatagtgctgggaagataaaggaggtggttgggatatgggctggttgggatattgtttggtttgcttttaaaaagcctgctcagggctaaattgtttactacctctagggactggctagtgctggaccgggcagtccctccagagtcagcaagaccccagatgcatcagaataaagaaaataaaatgcgtggccaggccaatgaggtggttcatgcctgtaatctcagcactttgggagaccaaggcgggaggattgcttgagcccaggagttcaaggctgccgtgagctccagcctgcaccacagagcaaggccctgtctcttaaaaaaaaggcagagaaaaaaaatggctaatacacccatcaaatctgaagataccttggtctcatattccagggtgatcaacccaaagcaacttctgcacccatgtgggcgcattccctgaggcttgggactggcccagccgggaccttcagagcatctttggtggattctttctctttgagggactgagagtgtatagaaaatgtgacttcactctctccttctcctggggaggtagtttctaaatgagaccccaagacagggagttgaagaggaaaccttccatgaagggaagttctgagcccccacataagcgattttttttttttttttgagatggagtctcgctctgttgcccaggctggagtgcgacggcacgttcttggctcactacaacctctgcctcctgggttcaagcgattctcctgcctcagcctcccgagtagctgagactacaggtgcatactaccatgcctggctaatttttgtatttttagtagagacagggtttcactatgttggccaggctggtctcgaactcctggcctcgtgatctgcctgcctcggcctcccaaagtgctgggattacaggcatgagccaccacacctggcccataagcgattattaatagcactgatcgctagtcatgtatctttagctcagaggttctcacccaaggacaagtctgtcctccaaggacatgtagcaatgtctgcaagcattgttggttgtcacagctagggagagggtgctactggcatctggtgggtggagactaggaatgctgctcaatatcctacaatgcacaggacagccccaaatagaataatctggccccaaatatcagcagtgctgaggcttagaaaccctgttttagcagattcatgtttttggagttctttaacatttactttatcctcatggggatatggatagaaggaaggaagttggatcttttttaaaggagcatgtaggtgctgtttgaatatccccttggttctttcagtatgcatcagcacaacttgcgtctgtcaacacctaatcctttgccttggtctttctctggtcccctgctctgcccccaaggaactgcagtccagcagtactgtgaattttttgtgccacaccttaaaaggagcagccgttggtggataaataccccagctccctcaccctcaggtgggatgacccctagagctccccagcaagaccaagccccggttacctacagtggaaactcgcttgatcacatactgtttacgttccaccctcttttcccttttctcacttctcctctcccctactggtgcttcctgagatcacctcccagacaaaccacttgcacccgaacccttgttccagggtctgcctcaggcagggggaccccaaacgtgtccttgtgctacatttgtgctatccacgtagtagcttgtttaatcatcaccatgaccacatgaggaacacaggtaaatattaaaatcctgtcttagtctgctcaggcagccataacaaaataccacacactgggtggcttatacaggaaacatttattctctcatagttctggaggccgggaagtccaagatcaaagtgttagcagggttagttagttcctggtgagggccctcttcctagcttgcagatagccaccttcttgctgtgtcctcatatgtcaaagagagagagagagagttgtgatgtttcttcctgttctttttttttttttttttttgagacaaaaatctcaaaaaaaaatctattttttttttaggcaaatcacatttttttgtcacccagcctggagtgcagtggcacaatcatagctcactgcagcctcaaactcctaggttcaaacgatcctcccacctcagccccttgagtagctgggactacagatgggcaccagctaatttttttaaattttttgtaaagatggggtcttgctatattgcccaggctaatcttgaactcctgggctcaagtgatcctcccaccttggcctcccaaagtgctgggattacaggcatgagccatggcatgcggtctcttcctgttcttataagggcactaataccatcatgaagtcccccatgacctcatctaaccctagttacctcttaaaggccccatctccaaataccatcccatcataggttagggcttcaactcatgaatttggaggcgggcacaatttagtccataacaaatccccttaatcacatcaagtaagacagagttacaggagggtctgtgactcctccagggtcccattttcctagaagccaggctaagagccccacgacgcaggaacggccctttctactcgcaaacaaagagaaaagccaaggagaagccaacacggagtctggctctgcaaaccgggcaggattgttaaagacctcctgggctcggggatggggtgggcggattccggctccacagctgcatctccaaggggcccgtggctgagaggggggttggctgtgtgtttcttcctcccctttcagatcctgacgggcgaagactggaacgaggtcatgtacgacgggatcaagtctcaggggggcgtgcagggcggcatggtgttctccatctatttcattgtactgacgctctttgggaactgtatccttcatggagagagagaaggggacaggcctggacctctggcagaggagaggttgcaggggctcaagggagggtactgagagacccagatacccagggcccaagtggtgtcccaccagtggttgcttttcctgactcagacatttgcagacaccctcctgaatgtgttcttggccatcgctgtggacaatctggccaacgcccaggagctcaccaaggtggaggcggtgggagaatgtttctctggcaaagttaccacctgcccatggcagatcaggacgggggtgggggtgggggtgggggtgggggtgggggcatgggaacagggttagaacttttgccggggatgcaccatgcaaagagaaggcgcctctccccccactcccagaaacagactgtccctcatcaagcaaattctacagccaagagggtgggaagggggaaggcagtgaggtcgctgcaggaaacggatggcaaactcaaccaaaaggccgtttacagggagtaagcagggtttccaaggaatggtgtagcccccaggctagtggatgggagagggagtgctgttatggggacccagtcagagctggggccaaggaaaaagggctgccaccagccctgggaccttagagaacccagaaccatggcaaggcacagatggagtggccaataaatgtccccaccttctctcttcctctggcttcccgctggagcctccccttagccaaacgcagcatgttaagagctagcctccgtccagcctaagcctctccccaaggaccctattaagttaagattacatgtaacaggtacagggtcttcctctcagccctggggtctccctcagcattgcagccccacctccagtgcctcgaggtattcaggacatgtttgtgaaattgaaccaaaccaagcagacgttgccaacgctccatctgccggccctggcaggagggagagagagtttcccggccccagctcccagtggagggaagcggaagtctctgccatcccaagcacacggccacaagcctggccactgtggagctggctggcatggctgagccgagggctgatccagccatgagctcatccaagttccaagagtccatccttaggggctggtgcaggagggtagcagaaggggagggagaaaggccagttcgtttatctcctgggaggtgtggacattcctctccagatccacattctttctttcattgatcctacaagcatttcttggtcatttaatacgtgtttttaatcctattcagtcctcatggaaaccttaggagccaagttctctgagccccattttacagatttcatcattcagtaagcacttaatgagcacctactgtgtgaccaaggccctggtctaggacttagggattaagcagtgaacaaaaaaaggcaaaaatccctgcctccgtggagcagggattcaagaggggagacagacaagaaacaagataaatttgtaaacatacgtagcttgtcagttggtgataaacacaacagagaaaaattcagtagggaaagtcagggagagttggaattttagatgagatgtgtgtcgcacagagaggttgagagacttgcccaaggccacacagcagtaagttgtggagctgggatttgaacccaggccgtctgggtctgcagcttgtgctcttaactgctgtgtaccagttgcttgaatttgggcatgttttatgctcacttgggaacctgtgggaaatgcagattccagggcccagcactggttctatagattatttggggagcctgaggatctgcattttaggtgtttctgaggcagatggtccagagacctagctctgaaaaatgctgggaatggtgccaggaggggtgggggtggccctatgagagcagggtggccagccagatcccatctccatgttgtctctgacagtgtcctgatctgaccatttccaaggtggtaaggttgctccccgttccagtgattcggagcacagcgggagagctgcctgcaatggcatgacttttcttatgggcgggttcatttctggccatttctttctcgttgccttttctttgctttttctttgttggcttttctgttttacgaatgaggccctgcatgaaggctgaagaaggatttaaagtccaaaaacgtctttttctgtatgtatttttaaaacctcttcccccattctcctcctctctgaacctaaccaccagtgagcagcagcaccctgggcagttggctgtagcccaagtgccctgctctcctctccccaccgccttcctgtcatgggggctgggaatataaattcctctcctcattctccttctgggggctgttgacagtgcatggcaggggccatcggatgccaggctcttctgtgtgtgagggtagttggtgttttttgaaagttggttcagagagttcacatggctcagaaagcctagtgagaggaaaatctttgcactgctttccagctcattaagacaggatgcaggggccaggcatggtggcacatgcctggaatcccagcactttgggaggccgaaatgggaggatcatttgaggccagaagttcaagaccagcctgggcaacatagtgagaccctgtctctacaaaaaaaaaaaaaaaattaaatgtatacaggcatagtggcatgcacctgtagtcccagttgcttgggaggctgaggtgggaggattgcttgagcccaggagttcaaggttacagtgagctatgattgtgccactgcactccaggctgggcaaccaagggagactctgtctctgaaaacaaacaaaagaaaaaaaaataggctgcaggaaagtcttcattgtaggaagagaagggacatttttattttttgttatctggctgtgtgttaaaataggcttcataatgagttagatgtcaaacttatacacagaggggatagcaatacacttaaccaatagcaggtacccattccaattggggagccttggttctgattggtcgaaatatttcaaatgttgcccctggtcagcaacagggtcagaagtgagtccccaaggcctagttcatgttttgtgaacaaagattccacgtgccttttaggacgagcaagaggaagaagaagcagcgaaccagaaacttgccctacagaaagccaaggaggtggcagaagtgagtcctctgtccgcggccaacatgtctatagctgtgtaagtgcccctaatccctgggatgctaccctggctcctgaacgtccacactatcccaggcacagatttgggaagcagtgggggtggtccttgacagaactgagctttaggaagagacacttcttgtccttccacccactttcactcaataaatatttggttagcagctgttatgtacccagcactgttctaacttctggggatacagcattaacaaggaggaaaaaaaaaatcccacctgtgtgtagccattctagcaagggaaggagtcaataaattagataaataagtaaattatatattgtgttagaaggcgatggaactacagagaaagtaggggagggaaatagcaaatgctgggagtgaagagagttgtgattttaaacgaagttgtcagggaaggcatcacctagaataggggtccccagtcccggggctgtggactggtaccaggccgaggcctattaggaacggggctgcacagcaggaggtgaacagtgagcaagcaagcattaccgcctgagctccacctgccgtcagatcagcaggcagcattagattctcataggaacacaaacactattgtgaacggtgcatctgagggatctaggttgcgtgctccttttaagaatcgaatgcctgatgatctcaggtgaaacagtttcatcccaaaaccaccccccacacctaggtctgtggaaaaactgtcttccacaaaactggcccctggtgccaaaaaggttggggactgctcacctagaaggttacatggcctgaaggaggtgagggaggagccactggggggcctggggaagggcatcccaggcagagggaacagcataggcaatggccctgaggcaggaacatgcctgatgtgaaggaggcctgtgtgactagaatcgaatagtaagtgtgaggaggtgaaggcaaggaggtgacaagcagattacacagggccttctgggtcaggggggaggacttgggcttttgcccctagccaggtgggagccatggagggttcttgagcagaggaggctgggacctgactcagatgctcacagactcctagcattcagtggggagtagagggtggagagcaggagtgggaggctgagatgtgggttggttcgcctgggtcatccatccaagctacagtgcctagcaatgctctaagtcctgtgaccatgccactgcaggaaagagcaacagaagaatcaaaagccagccaagtccgtgtgggagcagcggaccagtgagatgcgaaagcagaacttgctggccagccgggaggccctgtataacgaaatggacccggacgagcgctggaaggctgcctacacgcggcacctgcggccagacatgaagacgcacttggaccggccgctggtggtggacccgcaggagaaccgcaacaacaacaccaacaagagccgggcggccgagcccaccgtggaccagcgcctcggccagcagcgcgccgaggacttcctcaggaaacaggcccgctaccacgatcgggcccgggaccccagcggctcggcgggcctggacgcacggaggccctgggcgggaagccaggaggccgagctgagccgggagggaccctacggccgcgagtcggaccaccacgcccgggagggcagcctggagcaacccgggttctgggagggcgaggccgagcgaggcaaggccggggacccccaccggaggcacgtgcaccggcaggggggcagcagggagagccgcagcgggtccccgcgcacgggcgcggacggggagcatcgacgtcatcgcgcgcaccgcaggcccggggaggagggtccggaggacaaggcggagcggagggcgcggcaccgcgagggcagccggccggcccggggcggcgagggcgagggcgagggccccgacgggggcgagcgcaggagaaggcaccggcatggcgctccagccacgtacgagggggacgcgcggagggaggacaaggagcggaggcatcggaggaggaagtaagtggaggtgacctcgaatccgcagaatgacggtaacattaataatgacaacagccaaagtagcacgtgctgtgtatttgtttataaaaatatattataaaatgctgtatttggccaggcgcagtggctcacgcctgtaatcccagcactttgggaggccgaggcggatggatcacgaggtcaggagttcaagaccagcctggccaagatggtgaaaccccacctctaataaaaatacaaaaattagccgggcacggtggcaggcgcctgtagccccagctactcaggaggctgaggcaggagaatcgcctgaaaacagggggcggaggttgcaatgagccgagatcacaccaccgcactccagcctgggcgacagagtgagactctgtctcaaaaaaaaaaaaaaagtgctgtatttggccaggagcagtggctcatgcctgtaatcccagcactttgagaggccgaggcgggcggatcacttgaggtcaggagttggagaacaggctggccaacatagtgaaaccccgtctctactaaaaatacaaaaattagtggtggtgcccacctgtattcccactactcaggaggctgaggcgggagaatcagttgaacctgggaggtggaggtaggttgcagtgagctgagatcgtgccatcacactccagcctgggcaacagagcaagactctgtctcaaaaaaaaaaaaatgctgtatgtttttgtttttttgacacagggtctcgcctgttgcccaggctggagtgcagtggcagtcatagctcagtgcagcctctacctcccgggctcaagccatccgcctcagcctcacaagtagctgggaccacagacatgtgccacatgcctggctaatttttgtagagacagtgttttgtagagacagggtttcactgtgtttcccaggctggtctcaaactcctgaactcaagcattccgcctgccttagcctccctaaagtgctgggactacagggttgagccaccacactcagcctaatttttttacctttagtagaaatgaggcctggctctgttgcccaggctggtccccaactcctggcctcaagcaatcatcccacctcagtctcccaaagtgttcggattagaggcttcacagatggggaaactgagagattgagtgagctcctcaaggtcattcctctaaccagtgtccttgaacccaggctctctggcaccagaggccttgagcatttcagggaaactattaagagaagccccactgtcgtccagaattatatagtcttctgtgttcttgctgtgtgacttttgcaaagtgacttcatatctctgggcctcacacaatggaaatagtgggatctaattgggtcattgccaggattgaatgaggtaatgtatgcaaagggcctggaagagcagctgacacataataagtgctcggtaaatttagagcatttttggccattttcagccaactctatttacctaatgctattctttggaagtttgaaaagccactctgttgggaggccaaggtgggaggatcacttgataccaggagttggagaccagtctgggcaatagaggcagaccccatctctataaaatataaaaaattaaacagatgtggtggcatgcacctgcagtcccaactacttgggaggctgaggcaggagggtcactggagcccaggatgtctaggctatgatgagctatgattgcaccactgcacttcagcctgggcgacagagcaaggctttgtctcaaaaaataaaataaaaaataaagaaaaagaaaaggcactttgggccgttagaattgaagggagagcagagtttcaaagctttggatgcagcgggatgtggtggctcatgcctgtagtcccagcactttgggaggccaaggtgggaggatccacttgagccccggagttcaagaccagcctgcgcaacatagtgagacctcaccttttaaaaataaataaaaatgttagaaagcttttgaggcatcttccaggccagcaacttatccattcagaaccagcatcctctttttcataacgacattttgtaatactttctagcagatgctatagtgattctgcatatagggactcaacaacttacccattaaaatagacatcgtagacattgtcctattacaaattaacctgctcttagtcctcttttatattaccatcagggcataatattgatttttttaatgatgggtttaagtgatcctgttgtatgacatatgaggtaggccagcacttctcaaaatctaatgtgtatgtgaatccccagggatcttgttaaaacacaaattgtaattccgtagggctaaggactcagtggagcctgagattctgcatttgcaacgagctcccagatgaggctgatactactggtccagggaccacattttgagtaatgagactctggaggacatagtgaagtaattctgatatgtacaccatacacaaaatcaccatgaagtgacaggcacaaatgatggctaactctgggttgtgtggacaattcaaaccacatgaggggagttgccagcagtgtcaagatgttccacaatgttgaacacctcttggcaaagttccatatacaaaagagtctagtctttcttccatttatttaatagttgcattgcaggaaaatgcaatgtatattaaaaacatacaaaaaatatgttgtgttcttatgtaaaagagttaggtttaaactaaaagcacaggatcaggtgcagtggctcccacctgtaatcccagtgcattgggaggctgaggaaggagaatcgcttgaggccaggagttcgagaccaacctgggcgacataaggagacctcgatctctacaaaagaagttttttaattagccaggtgtggcggcaggtgcctgtagttctagctacttggaaggctgaagcaggaggattgcttgagcccaggagttcaagattacagtgagctatgattatgccattgcattccaacctgggcaacagaacaagtccttgtctcaaaaaaaaaaaaaagaaagaaagaaagaaaaaacccaaacaaacaagcaaactaaaagcacaggtaattacaagcaagatttttcacctctttgagggacattagaaagtcatgaagaggaaaagataagtctttcccatatgggactgtcatgtacatggtagggtatttagtataactgcctaccattctctaagtgcctgcagtgcccctcaatcattatgttattaggtttccacgtagttctacaacagttttctgaaaaccattgttctaggtcattctttcgcttcaatcttctcctatgggtttatgcattcattcagttagtatttactaagtgcctactatattctaagctcatgctgtgagttcagtcacacaactgcaagtgaagtggtctgagacattctgagaaatacgaccaagaaactgctcccagggtctcagggcaggtttccagaggagcaatctgagaagggagtagagtgtttcagtctaacaacagcatgtgcaaaggccctggggtggaccagaaggaggccagtttgcaggacatgactagtgacgagaaagtgacaaagaaattgaaggtgcattgatgagactctggggctgtcagtcactcaggggaatgagagatcaaaacgggagtttaggtggaataaagtgtttaccacagcactctctgtatagtaaagaccaatgaagagccaggtacaggccagtgtgatggttcacgcctgtaatcccagcactttgggaggcagagacaggtggatcacctgaggtcaggggttcagaaccagcttggccaacatggcaaaaccctgtctctactaaaaatacaaaaaattagccaggcgtggtggtggacgcctataatcccagctactcaggaggctgaggcacaagaattgtcctgcgaggcagaggttacagtgagctgagatcacaccactgcactccagcctgggcaacagaacaagactctgtctcaaaaaaaaaaaaaaaaaaaaaaagccaggtacagtggtatgcacctgtaatcccagctactcaggaggctgaggcaaaggattgcttgagcccaggagttcgagaccagcctgagcatttagagaatgggaggccagtatactaaataccctaccatgtacaagacagtctcatatggaaaagaattatcctttcctcttcatgactttctagtgctcctcacacaggtgaaaaatcttgcttataattatctgtgcctttagtttgttggtttatttagggttttgtttgttttttttttttttttgaggcagggtcttgctctgttgcccaggttggattgcagtagcattgctcattttagagatgagcaagacctcatgtctaaaaaaaaaagaaagaccaatgattattaattactcttgctattattactaatattactgttattatcagccttattaacagatctactgttattgaaggaggcagagtgacagggacaaaatgtctctccctaacaatatgccaggaagagtttttgaaagacaacagtaaacattggaaactacaagagcagcaaagcctggttgtgaaaggcaaggactttggggcaggcagtcacattcctgccctatcacttccaggctgtgtgactttcagaatttcactcctctctgggcctccatttcctcatctataaaatgaagataagaatagtagctacctccttctctgggtataagatttaactgagccgggcgcggtggctcatgcctgtaatcccagcactttgggaggccgaggtgagcggatcacaaggtcatgagttcaagaccatcctggctaatatggtgaaaccccatctctactaaaaataccaaaaaaaaaaaaaattagccgggcgtaggtggtgcacgcctgtagtcccagctactcgggaggctgaggtaggagaatggtgtaaaacccgggaggcggagcttgcagtgagccgagatcgcaccactgcactccagccggggagacagagcgagactccatctcaaaaaaaaaaaaaaaaaaaaaaaagatttaactgagttagtacgtgtaaaatgctttgagtggttcctggcttataccaagagctcaataaatgttagcaattttttgtagcattttggggtctcactatgttgcccaggctggtgtcaaactcctggcctcaagaaattctcccactttggcctcccaaagtgctggatttacagacatgagacaccatgcctggccatgttagctattattaatatgaatattattaagtactcaatgaatgctatttttagcagtaatagtaagcactcaggaagtgtcagctaatactgttagtaatactctcatcaataaacataaaaagcaataaggacccagcttgcccaaatcccacagatggttcctgctccctctcttcttcagaggaagaaactatctccccactttcacccccatagcctcagctggccagacccccattctgaaccaggggagtactgctaattccattattaatagacacatcaaacaatctggccgggagagacattattcatttggctgataaagaggttctaaggctctttggaaataaaagttcatgaagattcatgcactttaagagaaaaaaattcaagatcagtcattcatctgctttaaaaaaagtggcaaagataaaactttatttgagaatataaaataataaaaagacattttcgttctctgttgtgacaaagccagtggccttcggaggtctgccttgtacatttttcctcttcttcagtcattccttgaggctttttgcaaacgtaccctgtgtttttcattctccagcatattgataattttttttttttgagacatggtctcgctttgtcatccaggccccggagtacagtggtacaatcatggctcactgcagccttgacttcctgagctcaggtgattctcccacctcagcctcccgagcagctgggactacaggtgtgcatgaccatgcctagctaatcttttgtattttttgtagacacagggttttgccacattgccaaggctggtctccaactcctgggttcaagcgatcctcccacctcagcctcccaaagtgctgggattacaggagcgagctaccttgccaggccgatcatatttttttcctttttattcactttgtcttctcctcattcctaccttcatctgtctttcagtggctcactccagtgaaaagtggactgacgcacattctatttcatataattcaatggctgctggccccagatcccccataccaggtggccgagcccagtggccctgcagggtggacaaaatgagggtggaactttcccagactgtcagtaaaaatctatggaggacagagcttctgcctctcccttgcaaccaggcagtgccttctcccaggcctatctgcttgcaaagggaacttttgccaagacctgctccactctagaattcttatctctgctgttcgcatcctaattccacctgcatctgtcaccatgacaacctgctccccaaaaggaacaggaagagagatgctggacttttgagctccacagtttatcctgcatgggggtagggagtggttaattacttagcactctaattcttacggtacccccaatgggcccaagttggtttttttaaaaaaaaacagtcttgctctgttacccaggctggagtgcagtggcacaatcatagctcactgtagcctcaaactcctggactcaaatgatcttcccacctcagcctcccaagtaactggaacaacagtctcgtgcaactacgcccagctaattttttttttttttttttttttttagagatggggtctcactatgttccccagactgatctcaaactcctgggctcaagcgatcttccttcctcagcctcccaaagtgctaggattacaggcgtaagccactgtaccaagctgccccattaaagctttgaacaccagagagcccagctcagctgttttccagctgggtaactctgggtaactttgcctctctgaacctcagtctcctcctgtgtgaaatggggctgatcactatacccatctcggatggtggtagttgcagggattaaatgagttaatacgtgaggtccttaggacagggggtggggacacgagataagcaataaacaggaactgctgttattatcacccccacataatccgatctcagggtctgagtgtgccccaggcaaggtgtccacagccctctgcagaaggatgcccaagtgatcagctggcacaagaacgccacgcacagcaggtgttatgcaactggccacctattccaggcagaggatgccagatccccagggagaagggggtaggggtgcagcttcaaagttttctgccccttttgagttctccttggagacactttggaaatgaaacctcccggaaattgatattaggcctctgcaggctgagcttgttaaaatttcccaacaaacagagccaacagacgctctacaaggaagcaaaaacaagacaaaacacattggcagacccttttccatctgctcttggtagatggtattcctctaagaaaatgccgccacgagtttctccatggcttcttgagctggtggccaaaggatttaggttctctttgaaattataacttaactgggcctgctttatggcagggatatcactctctgaaatgtgtatatatatgtgtatgtatatatatacacatatatacacatatacatacacagggccaggcgtggtggctcacacctgtaatcccagcactttgggcggccaaggcaggtggatctcttgagccccaggagttcaataccagcctgaacaacatagtgagaccctgtctctacaaaaattaataaaaataaccaggcatggcagtgtgtgcctgcaatcccagctacccagggtgggaagatcgcttgagcccaggagttaaaagttgcagtgagctatggtcataccactgcacttcagcctgggcaacagagcaagaccctgtctcttaaaaatatattattattattatacacacacagacacacacagacacacacacacattacagatgatgagaaaatactctcagccaggttttcatgatacacaacttctcaaaaagcatcacaagcaggttagaattagggatttctttgtggactgtccaagatgttgaggaaatattggtttagaatttacctcatttaggccagaaatggtggctcacgcctgtaatcctaacactttgggaggccaaggccaatggatctcttgaagccaggagttttagcctggccaacatggcaaaatcctgtctctactaaaactacagaaaaaaaaaaaaaaattagccgggtgtggtggcacaggcctgtagtcccagctactctggaggctgaggcaggagaatcacttgaacctgggaggcagaggttgcagtgagccgagatcgtgcattacacttcagcctgggtgacagagcaagactccatctcaaaaaataagatagataagataaatatatataatatatatgttatatatataatatagaaactacagaacaagtgatctttgtatgtttccagaatataacagcgggacaggcataggatagacgttcccattgcaaaagggagaaattggaagggataaagaggtcaccagtcctaagcaagtgctaaatccagcaagacaaatcccattaggtttcaaggcctgagaataatcctcggtgactctcagctcattaacatacttagttctcagagccagactcaatgaggttacggcccgcatgttatgggtcaggaactgaggctaagtaactcactggagattatgtggtaaagaaggtccaggatcattgcttcagtctccaggatatggggaaggttctactcctgttatcccaaattttaaaatgtgggaactaaggctcagagaggttaagcaaatcacacagggttgcacagctagtgatgttgctgagatttccctgtgtgtagtggctcatgcctataatcccagcattttgggaggctgaggcaagagggtcgcttgatcccaggagtttgagaccagcctgggcaatatagtgagacctcatctctacaaaaagaaaaattaaaaagttagccaggcgtggtggcaggcacctgaagtcccagctactgggaaggctgaggtgggaggattgcctgagcctgggaggtggcgattacagtgagctgagatcgcgccactgcactacaacctgggcgacagagtgagaccctgtctcaaaaaaaaaaaaaaaaaaagacattgccgagattcaaacccaggtcagcctgtcttctgaaatgtccctctatgacccactcacaaaactgagaaggcagaaagttgcttggacctgtctatttcccctgtgcagtctcagagaaacagtggaactgcctcggtttctccttccgggaagtattcatagaagcatcccacttacctactttggtctgaaaataaattagcttgtctctcttccacttactaaaaacaccgtgggtttttgcaagttaaaatgcaaaaataaaatgaggagaatggtgctggtagtttagccagtgggaagccctctggggaaagccagccttttatttattacttatttatttatttattctttctagatagatttatgggaaaccagggctgtgttgtccaggggtctgtagtccagaaggcatcagatgggctactaagtgagtctttgtccacctgtagatggcaagaggcagggcccaggtgtccatggcttggagaggcaggggttgatgggaggtttgaggctgtgggatctctcctggggcctcagtatcctcatctggataatggggacattctggccaggcacggtggctctatatatccagcacttagggaggcctataatcccagcactttgggaggctgaggtgggtggatcactgtaggccacgagttcaagcagcctgggcaacatggcgaagccctgtctctactgaaaatagaaaaactagctgggtattgtggtgcacgctggtaatcccagctattcgggaggctgaggcacgaggatcacttgaatccacgaggcagaggttgcagtgagccaagatcctgccactgcactccagcctgggcaacagagtgaggctctgtctcagttaaaaaaaaaaagaaaaaagaaaaagaaagaaagaaaaagaaaatgggggtattcatttatcatttgacagtaagtttacccagcattgactgtgtgagaggccctgtactaggcagtgaaaactcagctaagaataagaaagttaaaaacaagctgggcattgtggtttacgcctgtaatcccaacattttaggaggccgaggaggaagaatcacttgaggccaggagtttgagaccaccctgggcaacatagtgagacgccagtctctacaaaaaattgtaaaattagccagacatggtggcgtgagcctgtagcctcagctacctggaggctgagatgggaggatcactggagcccagaagttcaaggctgcagtaagctatgatcctgccactgctctccagcctgggcaacagagtaagaccctgtctgaaaaaaaaaaaaaaaaagaggccaggtgcagtggctcacacctgtaatctcagcactttgggaggctgaggtgggtggatcacttgaggtcaggaattcgagaccagcctggccaaaatggtgaaaccccatctctactgaaatacaaaaaattagccggtcgtagtggtgggcacctgtaatcccagctactcaggaggctgaggcaagagaatcgcttgaacctgggagccagaggttgcagtgagccgagatcacgccactgtacgacagagcaagaaaaaagaaagaaagaaagaaaagaaataagatgatggggagttgtggaaacctgtccatgggcacgtgaaggtcttgacctctgaccaagaagtgaacaggctcctctcaattccaggcactgcagggatctgggacatgacttctccatgaccaaactgtaccctttccttttcttttttgtttttttggtgacagggtctcactctgtcacccagactggagtgcagtggggcgatcacggctcactgcagcctcaacctcccaggctcaagcaatcctcccacttcggcctcccaagtagctagaactacaggcacacagcgccacgcccgtcaatttacacattttttgtagaaatagggtctcactatgttgcccaagctggtcttgaactcctggccttaagcaatcctcctgcctccgcttcccaaagtgctgggattacaggcgtgagccactgcgcccagcccaaattgtactcttgaaagatggaatcttagctaggatcctgaactgttgccttttatcctaaatcagttgttggttctttttcattcacttgccttcctcagagagaaccagggctccggggtccctgtgtcgggccccaacctgtcaaccacccggccaatccagcaggacctgggccgccaagacccacccctggcagaggatattgacaacatgaagaacaacaagctggccaccgcggagtcggccgctccccacggcagccttggccacgccggcctgccccagagcccagccaagatgggaaacagcaccgaccccggccccatgctggccatccctgccatggccaccaacccccagaacgccgccagccgccggacgcccaacaacccggggaacccatccaatcccggcccccccaagacccccgagaatagccttatcgtcaccaaccccagcggcacccagaccaattcagctaagactgccaggaaacccgaccacaccacagtggacatccccccagcctgcccaccccccctcaaccacaccgtcgtacaaggtgagaccctctgctctcacatcactgggcaggggacctggcgtccctggagccagaggctctgctgagtgaccctggactgtgaccccatctctctggcctcagtctcctcccctggaaaatgggcataggcgtagtttcctaccccacagggctgtggagggttcagtgagataatttgtgcacagtgcctggcacggggttgtgttcagtcgggttagcaatatcttctacgtccttccttcccaaggggagccaggaagccaccccatttgaggagcaatagggtcctctgatggaagcttgagggggtcagatgattgattctctcggcccagcactgtccaaaagaaatgtaacacaggccacatgcaaatgtcagtttaaactctctagtcgccacattaaaaaaggggccagatgtactggctcatgcctgtaatcccagtacttcaggaggccgaggtagagtgagccaagatggcacctctgtactgcagcctgggtgacaaagcgagactgtctcaaaaaaaaaaaaaaaaaaaaaaaatggtgaactgctgggtggattatgtcttaagttcatctagtgtcagttctatgtgagagattttcatgagtttgctggataaaggctttccatggtcctgagacctaagatcctaaggtcttgtcactgtgcccattttatagatgtagggactgaggctcagagaggctcagcctgcccgtgggcacataagcaggctgggctgcagaatggaagctccagaggctgatggctcctccccctgagtcaagagaggggtgctaatgggggcatgccatgcagtttatgggaggtctcagtatttctatctgttcagtgggtctcttggcactctccctacctgcctgcaagtgagggtgtgaaggtccaacgaggataggggcaggtctgtgttaatatcccatgagggccccaccgcactcaaggctatagagtggttgagagcaggctctcgggggccaggccgcctgggttccaaatgccagctctgccacttcctgctgtgtgaccttagacaagtcactttacttctctgtgcctcaatttcctcatctgtaaacaggagatcagaatatatcaacctcagggctatacaagggttcagtgatgtcataagatgcctggtatatacagcaggcactttagaaatgtcagccgcttcttgcctgccctgggagtacacaggagttcccagagacttgtgggaaattgtggagggagccctgtgttggttcttgtcccaacagtgaacaaaaacgccaacccagacccactgccaaaaaaagaggaagagaagaaggaggaggaggaagacgaccgtggggaagacggccctaagccaatgcctccctatagctccatgttcatcctgtccacgaccaacccgtgagtatggcccccagcaagggcagggggggcctggggctcccaccagggtggcggaagtcaggccagatagagggcaatgagtgagtgttgaccaccatgagtccagggatacctttgaacaagttgaaaatggatgctccttccgtaagtcaggtaagatgatttgtcacaatatactttgttggaagagacccctgtcctgccatccactagaaaatcattgttatttatgacaataaataaacaaatttgtcataaataaacaaataaatttgtcctaaacaacaaataaatttgtcataaataaacaaatcttcactgtgatgtaagaggcacccccttagaaatggctgccttgtgcagtacacagcctgaacaactgcacgtggcagccctaggacctgaactctgtttctaacctagactctgtaagggtttagattctgggcggatagtgtctgagttccatggccttctgtcttgggcatctttgaaatggatagactatttaggggagaaatttatcccatgaatgtcgtagtggctcggaggttgttttagaattgaatgtctcccagggatatttcttgaaagcctgaccgctcaaaatgcttcttgacaatgaaggatcatgtcagataagatgggggagaagctgctttctataatctgcctcttggcaactcaccctgggtagtaataaataaaagtacctttaaagtacttttttatttagttgacttatcgattttactaaggaaacacttatgtggtatctactcagtgccaggcactgttctgagtgccttaaaattttttttaatttctctgaggttgttactatgcttagctccatttgacagatgaaaaaactgaggtccagagacgtgaattcacctgcccaaggtcacacagcaagccagtgggagagctggagtttgagcccagacactggctctagcctccttgttcttaaccactcagctctgctgccattcacacaaccttatgaactatttattattggctccacttattaagaggttaactggcacatcccattggcacattcaaggctctgataaggcctgcaattcataatttcaataactaactttttggagcccctatcatgagccaggcataaattaagtcttgggtctcatgattttgtgaagtaagcactagtattacggctattttacagatgagggcaccaaggcacagaggggacaagtaacttgcccaaggtcacacagctaatttttaaaaagaaagaaagaaatctacttaacccatagattcacaatattgtttggccctgggacatttaatatcgaaaagcctttttatctcctacagaattaaggaccgtatttcttcaacctagcttggggatcaagatacttcaagagggtcgtttgggagtgataggaactttgctaaacagggcatgtgaatgtcttctctcaccgaggtcccctctgccttcttggggttccaggacccagagagggcccccacctggaggagtttaatagtttgttgtgtaggaggccttgggggttggagatctcagtagtggtaggtaacatgagattatggaagaaaagggtttgtgagcctgtggtctgagtggacctctgcacgcccatctgtctccaacagccttcgccgcctgtgccattacatcctgaacctgcgctactttgagatgtgcatcctcatggtcattgccatgagcagcatcgccctggccgccgaggaccctgtgcagcccaacgcacctcggaacaacgtgagtcccacagagcacaccccttcctagcctggctgctctgcctcaggccactttctcctgcatccaaaatgctcataggtagggtgggatgttggggtcacccctaggcatagcccttatggctgctggttgagaggggaagctctgattccttggggatgctcttgggagcaagacattccttgaggcagtttctctgtgagcctggtggggtggaggtggcccagagtgactggggctgaaaattgctggattctctaatggaggcgtgagactagcaggatatggatgttgcacattctctacatggaataggggggttactggggcaggggcggtgctcagaggtggtcccctccgcagtagacatttccctttgtacacgaagctttgaaagaaacaactatttggctcagaaacacagcctaagcttttggtttttatgaaagcaagcccctttgcggatggtgggtctgttgacaacccctgttaattgagcacttgctgtgtcccaggaagaaactcagcatgcagtatctcatttaatcctcacaatgcgcccccccaaccccccgcccaggcatccccatttgacagatgggaaaactgaggctcaggggaatgagagagtggtaagtggcctgtccagggtcacacagcagaattccaactctgcatcccccaaagctcccactgcttcccccaactgtctgcatttactaatcacctactgtatgctacggatgggtgtgcatagcccctttgagtcctgacaagcaggaatgagtgcatgcttgtggttgagatggggaaaccgaggcaccaacaggcaagggcgtgcctcagtcatgggctgcgggcagaggcttgaccccagggcctggtagagggtggactggtggctcctgtttccctccccagctccctcccccaacccttccctcccaacccagagccaaaaaagtgtgttttctgctggtccaaggctctgctgccctggctaagtaggttaggacccaggcaaagctggcgagccccatccctcaagcccgcccacagcttaccatgcactttcccttccttcccaggcctggcaggcccccctggggacctgatgggggagatggaaggaaataattagaacgcagctcctggaggaagctagagccagtgctcagcctcctcacagtccgcttagttgcttcccgcagcctggtttcccccaggggcctccaggagccaggcgtggggaggaggtgtccctggaggggtccacaaaccccctgctgacgcgaggatgctgaagaaggcgttgccttcggcagggagggcacaggcatggatgatccagggggcacggcagctcccagggctgaagggaatctaggcagtgctcagaccaggccccagggactgtttgcaaagagcgttcagctccccggccccctccctcgtccatctcgcagtcgaaacttctctacaagaacactgtggccccataacgttcacaccacgtaaccaccatccagggcaagaaatagaacaaaaacgccccacgcggcatgtgcctcctcgatcccccacccccaccgccttctttccctctagagctgctggggacactgtctggagacatttttggttgtcacgacaggaggggggaggtgctcctggcatctggtgggtggaggccagggatgttgctcagcacccgccgatgcccaggacagcccccactctagaggatgatccagacccaaatgtccacagagcccagcttgagaaaccctgccttaccggtaaccacgaccccagcttctggaatgagcgtttttggcttctctctttttcccacctgcacaggctttttttttttttttttttaagagacaatgtctctctctgtcgcccaggttggggtgcagtaacgtgatcatggctcactgcagcctcaacgtcccgggctcaagtgatcctcccacctcagccccccaggtagctaggaccacaggcatgcaccaccacacccagctaatttttaaatgcttgtagaaacgggcctcgctatgttgccaggctggtctcgaactcttgacctcaagcaatcctccctcctcagattcccagagctctggaattacaggcatgtaattccaattcttacatgcctgtaattggccaacactggccaattcttaaaaactgaatttatgtttgctcttctgtaacattcaataaatgagacacttctatgcttcgcattaaatgagtacatgttgcttttgcaggattgatgggcattcttttttttttttttttttttgagatggagtcttgctctgtcacccaggctggagtgcagtggtgcaatcttggctcactgcaacctccgcctcccgggtttaagcgattctcctgcctcagcctccagagtagctgggactacaggcaggcgccaccacacccggctaatttttgtatttttagtagagacggggtttcacactatcagccagactggtctcaaactcctgacctcaagtgatccgcccgccttggcctcccaaagtgctgggattacaggcgtgagccaccacgcccggtcaatgagcattctttatgatgctgttttgagatttactgtgtggcatgggatgtgttatccatcccctgttgacagatgtttgggttgtttctaagtgtgaatactgtccccatgccacgcccctcaacatgtttcctgagtcacctggacagtaatttctccaggaggccagatgcagtggctcacgcctataatcccagcacttcgagaggccaaggtgggagcaatgcttgaggccaggagttcaagaccagcttgggcaacatagtgagacccccacctctaccaaaaaaaaaaaaaatttttttttttttaattaaccgagcgtggtggtgcacacctgtggtcccagccacttgggaggctgaggtgggaggatcacttgggtctggaaggtcaaggctgtagtgatccatgttcataccactgcactccaacctgggtgacagagcgagaccctgtctcaataaataagaattcctccagggtataaaccaaaagcgaagtttctagagcatataatttgcaagtggttggcctcagtaaatgcagcttgaatgtttattggacaataaacacagtgaccctttgggaggccaaggcgggtggatcacctgaggtcaggagtttgagaccagcctggccaacatggtgaaaccccgtctctaccaaaaatacaaaaattatctgggcgtggtaacacacaactgtaatcccagctactcgggaggctgaagcacaagaatcacttgaacccaggaggtggaggttgcagtgagccaagatggcgtcactgcactctagccttggcgacagagcgagaccctgtctccaaaatatatataaataaataaaaataaacacagtgggccgggcacagtgggccgggctcgcacctgtaatcccagcactttgggaggccaaggtgggtagatcacgtgaggtcaggagttcgagaccagactggccaatatggtaaaacctggtctctactaaaaatacaaaaattagccgggcgtggtagcatgcgcctgtaatcccagacacttggaggctgaggcagaagaattgcttgaacccgggaggcagaggttccagtgagccaagattgtgccactgcactccagcctgggtgacagagtgagacaccatctcaaaaaaaaattaaaaaataaatgaacgcagtggcccttgcaccagtagctcatgggaactcctgttcttccacatccttgtcaacacttggtactgtcgactgtttcatttggccgatctgctgggtgtggagtgagatcttattggggttgtgcttggcatttccctgtaatgaatgagatcaagcacttttttggattagactgagccacaggaaataacattttcaaatagatgaaaaagatctaagtattaggaatacttgaacctaatttattggtcttttgatttcctcttgcacagcttattaagagctccagaattagattcacctgacccccacggcctgccctttcccagctccctctcttccttctttccttccattcattcctttagtaagtatttgataagcaactactatgtgccaggtactgagcgagccagggaggattgacagggtatgagatggtccctgcactcccagagcccacaaaccaccaggcctttgaccaggctgtgcccactgcctcgtgcacctgaaatactctcccaccaccatcccctctgcccacccaggtctttcaagccaatccccttgcaccagcccctccctccaggaagtcacctcaccctgaccccaggcactctggtctctgattcctcttcaagcaccacatataacaggaatataagttataaccacacagatcacagagcccagctcctccaggacccagtacagccccaactgttgatgcattcattcaacaaacatttcttgagcacctactgtattcctgaccctgtattataagctggagacgccatggtgacagacagacatccctgtccttgtggggctgacatttgggtgggggagatggacaatgagattatcagtaactacaacaaatgttcagggagtgataagtggccgggggtgtggtgggcagagggaaggagagacttcgtaaagaggatctcaagcaccaggagatggaatttaaacagccggtcaggggagtcctcactgggaaagtgttatttgagctaagtcataaaggaggagaaagacggaatcaaatgggatgtgggggaaagcattccagagagacagaacagcctgtgcaaaggccctgaggtggaagcatcttggggaacaaaaggaagtgagcaagggagagaatgagaggaagtgagggcagggagctgaatggtcagatcgtgcaggggcttgagggcctcggggaggactttgacttttatccctgaatgaggtgggagccacggaggattgtaagcaggggaaggatgtgcctgacttctttggtgttcacagcgccctctggtggccatgttcagtaatgctcagcccttgcagcttctgggtggatctgattttttttttttttttttttttagacagtctctgtctcccaggctggagtgcagtggcacgatctcggctcactgcaacctccgcctcccacgttcaagtgactgtcacgccttggcctcccaagtagctggaattacaggcacacgccaccatgcccagctaattttttatatttttagtagacacggggttttgccatttggttaggctggtctcgaactcctgacctcaagtgatctgcctgcctcagcctcccaaagtgctgggattacaggctcgagccaccgtgcccagccggtgtccaccccatgtctagcaccagccagacactgtgccggcgcaccctcatcttcaggcctgggtgacaccagaggtgtgctatggtgtgtcctggacaggggctgggccagaggacattgctcgtccaggcagaaacatcaggcctggggaggggcacaggaaaaatcaacctaccctggcaggggcctggccttgaagcaggaagagatgccgtggcaggaagttggccccagtgtttaaaaaaaccacgtagcaactatttctcgcccaggatgcccaggaaagcaagggtactgggggattagatccatcaccaagaaggatacagtcagccctgaacttctctggggccgcttctaatccactacagggcttggggcaaattttaaaaggtacccttcccgtgggttagcgaactggcctagtacagtgatttttttgttaggatttgctgccatctgctggacaatttcattcacaacatacaaatctgcagtatgaaaagagatgggaggggcccttgtgcagtgcacgccctgcgcaactgtatatagcagctgtgtttcctcttctgggtagaaactctgctccccagtaggcgatcgttagttttaccggggctctgctggaacaggccagtgatccactgctctcttgcttttatcccttacaggtgctgcgatactttgactacgtttttacaggcgtctttacctttgagatggtgatcaaggtgagtgcagattataagtgagaacacacggtaatttttttttttaagcaagtgcagggctgggcacagtggatcatgcctgtaatcccagcactttgggaggctgaggcaggcagatcacttgagatcaggaggttgaggccagcctggccaacatggtgaaaccccatctctactaaaaatacaaaaattagccgggcatggtggcacatgtctgtaatcccagctactcgggaggctgaggcaggagaatcacttgaaccctaggctgcaatgagccgatgtggaggctgcagtgagccgagatcttgccactgcattccagcctgggtgacacagcgagactctgtcaaaaaaaaaaaaaaaaaaaagagctgggattccaggagatcctgagcctccaagaatgccccccttgagaggatgagtctcccagaggattagaaatgcctggtgtgtttgaagagcagcaaggaagctggtgtggctgggcggagtgagagaacagtggggaaacgaaggacagagagatgagtggggaggtgagggggcaccttgtgccggggatcacagagagggctcttcggctcttactttgagtgaggtgagggccatagagtgttctgagcagaggagggacttgatccaggtgttcacaggtgccctttggcatctgtgggaagccagaggacctgtgagcaggtgatcacactggtccccatgggcgatgacggggacaggatcaggctggtgaccaaagaagaggtgagaagtggacagattcttggaaggttctggaaatagagccagtgagttttgctgatagagccaccaatgagggatttgggacaaagaggcatcaaagaggatcccaaagtttggatctaagagccggcaagccagagctggcttccatcaggcaaaggggggccgcctcatggggcaggggctccccactcctccctggagtcctctggccactgcccatccctgcaagatgaggtggcctcattggcttccctgcctctccccgagaggctagagagtgggtggcagcaccccagggtggggatcaggtgggggttctgagcaccctctcttctcccccacagatgattgacctggggctcgtcctgcatcagggtgcctacttccgtgacctctggaatattctcgacttcatagtggtcagtggggccctggtagcctttgccttcacgtaagtctcctcgcaagggttcctcttgcctcttttcccccaacccccagcctgggccacacatcggattacaggacatgttctcagggtctagggatggggtgtgtgggctccggggacgtgggagatatcagcatgccaccaggaagagcttcgatggctttttgcatgatgtccatggaggaagaaggagaagggaccccccctcctgccaaccttctacctcctcacacagcaacgggcctcagccacatcactggccccttgctgtgcagcttcctgtagactagcctcgccggaacatctcatccccctactactccacaagcgccgcccaaaccgctgtctctttggaaagtccctaaagagacaatcaggaaacgaatgtgcatgagaattctgaccccctccctatgcctgaaggccccgtagttgtagacctggtgactccctttgtgtgtctttcacttctcctggcagtcctaggattctctgccctctgaaaggccatgtgtcatcctgcagctccaagatggcgccccagttgtaggcagccatttcaggatggcacccaagctcttagtagtcatcccaagatggcatccaagttctgggtggccattccaagatggcccctgagttctgagctatcattccaagatggcctctgaatttggggtggtcattcttagatggtccctgagttccaaggtgaccttcaagttctgggtagccattccaggatggtccccaagctctgggtggctattccaagatggccccaagttctaggcagccattgcaagatggcccctgagttccagggtggcccccaagttctgggcaaccattccaaggtggcatccaagttctgggtggctattccaagatggcctctgatttctgggctaccatgctaagatggcctctggattcttggtggccattcttacatggtccctgagttccaaggtggccttcaagttctgggtagccattccaagacggtccccaagtcttggatggctactcgaaggtgacccccaagttctgggcagccatctcaaggtggcaccctagttctgggtaaccattccaaaatggcacccaagttctagggcaaccatttcaaaatggcccccaagttctgggtgactatttcaagatggtacccaacaggtgagtggccattagcccttagggccctgatagcagacttagcagtacattcctgaagttgtagacatttggagcgggatgaaaaatatctaatcagtctttaatcaagaaacaaatcttggggaccctggctgtgcccatcatggtgaatgattccctgacaggttttgaaaggatcttgacacattcactcccatcgtgagagaatcaggggcttcctcctgtgcctctgcctctaggctccctcctgagccaatctggaggggcccttgaatggtctccctcaccaaacaatgaggacttggtttgtcaggagggccaaaatagtggcccatttccagtagaagggctgttaagtaggccacacttagattcttctctgggaacacaatgaggtcaagttgtgttagaacaaaaaatctccagagtttttggatgcctcagagctggagatgtatcatgaaggttgggaggctgattatacttctttctctttctctttcactccttcctcctctttctcctctctttttgttcgtttactcttttctttttctcttctcctctccctccccacatccttccctctcctcaaagcttttcagtgtctatttgactactagagcaatgcacggtggcttacacctgcaatcccagcactttgggaggctgagacaggcagattgcttgagcccaggaggccaagaccagcctgggtaacatagggagaccccatctctaaaaaaaaaaaaaaacaattagccaggcatggtagtatgcctgcactagcagctacacgggaggctgaggtgggagaattgcttgagcccaggaggttcaaggctgcagtgagccgaaatcgcaccactgcaccccagtctggggaacacaggaagaacttgtctcaaaaaaataaaaagtttaaaaaattaaaaatcaatgaatttgctatttagaatattatgctttatatggttactgaataattttaatagtgatgagtacaaaaaaaacaggtttagcaagctgttctgtaggttaaaaagtaaataaataaataattaattaaacaaaatacaatgcacatcaaattaggggacaaagattgtgacgaataagacaaggagtccatgtctttaaaatatgaaaagcagttacaaatcaataagaaacactacttctcaatggataaatgggcaaaggacataaacagaaatctgatagaatgctggcaactagtaaaaatggaggtaaatcaacccttggaattcagagaaatgtaaaataaaaacgagatacaattcattccctatcaagttagcactgttcccgccgcacccccacacacacacaaaaaatgatttttttagctaataaacagcatatataagaatgtattataataggctgggcacagtggctcacgcctgtaaccctagcattttgggaggccaagggagggggatcacctgaggtcagcagttcgagaccagcctggccgacatgacaaaaccctgtctctactaaaaaatacaaaaattagccaggcatggtggcggatgcctgtaatcccagctactcaggtgggtaaggcaggagaattgcttggacccaggagatggagactgcagtgagccgagatcatgccactgcactccagcctgggtgagaaagcaagattttgtctcaaaaataaaaaaaggaatgtattataataaaatatacttttctccccctctatcacctatttaagcaggtccttcaagttgtcaggtagacatcatgctatgagaaaatttaaatcctgaaaagccagaatgttttaccaccctcagcctggaatgaatccttctcctatggaaataacctacgggtttctccacccctctctgcctttcagccccttccctccctctcccctccttttctttctccctctttctcttcctcctttcccctctcttccctctctcttcttccctctctctgtctctttctgttcgtctttctccttttaccccctctcagtttctatctttttattttcctctttctctctctctctccctctctttctctctcactccctgcactgttgatgacctatgtccttgggtgatgtgggcctcccctggaccgtgtagcttggagaaagctgaccctctgtcatcggtctggcaacagggacttggcccccctaccctgcattctgatgaggaatggtattcagacaaaggcagatcccaggacacaggaggacatgctcaggcagggacccccgcccctttcctctggggcaaggtctgctcagcagcctccaagattcctagggctcaagaggtggcaggtagctcagggcactagggcaggcagtggggtgaatatgtcactcatatccacctgtccacacacaatgcttaccttggccacctgtgcccaggggaatgggttttatcctgtgaatcctcccagtgaccaccactgagtgtggcacagataaatggtaccaagcccaagctgttcaggtctccaatgtcactttcctctcagacctctgttgtagctgacatactgtaatgctgaggagggccgggcacagtggctcatgcctgtaatcctagctctttcggaggccaaggcagatggatcacctggggtcaggagttcaagaccagcctgggcaacatggtgaaaccccaggcaacatggtaaaaccctgtctctactaaaaatacaaatattagccaagcgtgatagcaggcgcctgtaatctcagctactcgggaggctgaggcagaagaattgcttgaacctgggaagtggaggttgcagtgagccaagattgcaccactgcactccagcctgggcaacagagcaagactctgtctcaaaaaaaaaaaaaaatgctgaggaggtgactgtcccacctccatcctccgagttgaccatcacaatttagggaggggaatgacctacaaaggacccagaagcaagcctttcaattgttgagcttttgccattatgggccatcgtttacaacatgctgtttctaggttctctggaggtaaaattagcctcctcttttaaacaaagctaatctgcaaaagcgaaccaaaaattcttttccaccagagatcaattagcagaatgagctgggtgcgatggctcacacctgtaatcccagcacttggggaggccgaggcaggtggatcacttgaggtcaggggtccaagaccagcatggccaacatggtgaaaccccatctctactaaaaatacaaaaactagctgggtgtggtggggagggcctgtagtcccagctactcgggagggtgaggcaggagaattgcttgaacccaggaggtgaaggttgcagtgagccaagattgtgccactgcactccagcctgggtgacggagcaagactccatctcaaaaaaaaaaaaaaaaaaaaaaaacagcagaatgattcttttggggagttgactttttttttaatttctgagttttctttttaaatatcaagttatacaagggcattcaaattggcctacaactcacaggaatttggcagcctgtttgcagagtcaagcttttacattgttctcatgaaattggtacaggcataaagccacccttcactcttgaaaatccattttgaatgttgttgttttaattcttatgcaagaaaaggatctggatagggatttcaggccatcctgtcaaccctggcaggcttgtagatcatgcaggaactgggaggtgtgagattttgccagtaggatcctggcaagtgcctgggactctcccagggttttggaagagccgacggacatgagtccaacagggagcatctttatatcatggccgaagggatgagagaggagaccctcaaacctcacgcctaccacaccctccccaccccactgtcaagagtccatctggtactgctgttcctcccccagggcagggctgcaggcccagcacagctggccaggtgccttgatcaagccattcctgcacacctaagagccaaactgctagaaaaccagaataggagctactgcttttttccctaaaaagttttggaatcttctccccgttacaggtttctggcctcttttgcctgagaaggtctctcaccctatgaggactttgcttattgtctttccttgttatcggatagttggcacattggaaggagcatggatgctctgaggttctcagcctgagcgctgaactctccacccgccccccaccccccaccccagggtcctctgcttatttcctttctggtcttttaacttgctttgtctgtcctctgtgcatatcccctcatagacaaggctgagagccccacaagtattagattgaccttattgttttaagaaattgtccctccaggtctgtttgatttctctctagatgtgcaagtcctttagcctctctgtgcctcagtttttcccatctagatgaggaaactgcggcccagagggactgtggagggaagtaagtccgacaagatcactgaggttgggttcagctgtcagatgctacccatctcccagccctgaatacggaggctcacagtgagcagaatgatgctcagcagcctggccagcctgggttctttgaggcctggcagggctgcgagatccaggggaagggaataggggaagggagcataaggttattcccttccttgttgaaaggaaccttgccattctggcctgttggggtcaaagcaaggattcttcccccagtgctgtgattgtggcctcgtctccgatatgggagaaaactatccctgtggtcccaccaagggatgtattgaagctcttctgaagatgtccacccctcctgcacctcacccaaatatctgtgtgtgtgtgtcctgctcaattcactgactgtgtcccttgtatccatgcgtctaccataaacaccccatttcatgagccatcacacgtggtatcacgctctgtgcccatgcatcagggcggccaactgacatttctcagcagctggcagatcatgatcctgccctcaccgccaagagtccatctggcgcggctgttcttcccccaaaggcaggaccgcaactggcagagcgccttgatcaagctgctcctgcatacccaggagccaaactgtcaggaagccaaagatggagccctcaggctgctatctcttgatcctcatcttcaaaacagcccccacccctgaaggcattatttttcttgtgtatgatgaaatggaaagaagattagagtgcgagatacccacacctgggtttgaatcttagtctgtcttcccagctgtgtgcctgcccttgggcaggtcactctttttctctaggcctcagcttcctcatctggaaaatggtcataatggtgctgtcttcccataggcaaatgcagtgatgtccagaagactcccatattaaacctaaagtcagcagattaggcaaaaatcactgtcattgaaaactccctcaatcatccgtaaagaagctgggtgtggtgtctctcacctgtagtcccagctacttgggaggctgaggtgggagaatcacttgagccagggagttcaaggctgcggtaagctatgattgtgctactgcactccagcctgggcgacagagcaagaccacgtctctaaaaatataaaataaagccgggtgcggtggcttacgcctgtaatcccagcactttggaaggctgaggcagcctggcaacagagtgagaatccatcaaaaaaaaaaaaaaaaaaaaaaaaagtagaatctatatgattctacgtatgcaataattcctagatacactgaatttgagaaccccaagtcagactacaggaaaaggagatgagggggtgtggaggagaatccacttggaatatttgtagacatttaaaccattctgtgttttaaaaaatatcacagccgggcgcggtggctcacacctgtaatcctagcactttgggaggccaaggtgggcggatcacgaggtcaagagatggagaccatcctggctaacacggtgaaaccccatctctactaaaaatacaaaaaaaattagctgggcgtggtggtgggcgcctgtagtcccagcactcgggaggctgaggaaggagaatggcgtgaacctgggaggcggagcttgcagtgagccgagatcttgccactgcactccagcctgggcgacagagcgagactccgtttcaaaaaaaaaaaaaaaaatcactaacttccagaggggtcgtggatggaaaattccatagagtccgcttggcgacagggtttccgccattctgatggcggtcaagtctttctaacctggatctccagtcattgttgaaggcgcctaatgagccccaagcctgattccaatgaatcacgagaggaccagctgctaggtgctgatagctttccccaggcccgcatttgctcagagggcttcagagttgcttctaattccatcccaagtcagaactctttgctgaccccctccttcataaagagcaaagccaaggccatagcttttgttaatcaaacatcagaattccacagacctgagttggttggttgtttgttttaagagacagagtcttgcccaggatgcagtggctcacacttgtaatcccagcgctctgggaggcctaggcaggaggatcacttgagcccaggagtttgagaccagcctgagcaacataatgagacccccgtctctacaaaaaatggaaaaatttgcctgtatttccagctacttgggaggctaaggtgggagaatcacctgagccctggaggttgaggctacagtgagccaagatcccgctactgcactgcagcctgggcaacagagggagaccctgcctcaaaaaaaaaggagagaaggagagagacagggtctccctatgttgtccaggctggtctcgaacttctggcctcaagcaatcttcccaactcgtcctcccaaggtgctgggattatagctgtgagccacggcacccagtctgggcctgttttgcagatgaggataacgagaggcagagtcaggattcaaacccaggtcccctcaacttcaaagctcacaaccttttagacattctaaaaccttgcagctccacaacgcctggagaagaggggtttctccggctcttggcagtgactttccgtggtgaattcacctttggtaactgacagctttgcagctgtcctgctacctggaaatttggctttcttagtgctttcttgggcagtgccaggtgcctgccaagggcgggggactgaatggaggtgggggcggcttccagatggaaggatggacatcggccagcgccatgagcctgaggctcccccaactgctgcccgggcgggactcgggggtgctcaggggtgcgtgtgtgtacgtgcgtgttctgtgttcttttttctgaggccacttacgatctgtctctccctccgatgccacatcaccaggagcagtacacggtaaagtctctctctatctttctctctctctctctttctctctctctctctctcatattctgtctctcgtgatctgtcccctggtgcagcctcgttagttctgggcctgtttctgtggccttgtgtccttgctgccgctgtcctgtcgcttcaaatgaccagaactcactccctgcgaaggaggcatcccaaagggtcttgccaatgcctccgcccatgccccaccagttcttgcagagaacagaaggggcagaggttcagtttcaataggcaagctgggtggagcagttatcagaagcaatgaaagtgggccagacacggtggctcacgcctctaatcccagcattttgggaggccgaggcgggtagatcacttgaggtcaggagtttcagaccagcctggtcaacatggtgaaaccccatctctactaaaaatgcaaaaaattatctgggcttggtggtgcacacctgtaatcccagctacataggaagctgaggcaggagaatcacttaaacctgggaggtggaggttgcagtgagctgagattgcaccactgcactccaccctgggtgacagagtgagactctgtctcaaaaaaatatataaaataaattgaacaataaaaaaataaaatggccatggaatcgttttcagatgaggagatgcagaatgcccatggagacatgctcccaattgtcacttgtttgggacatcaagattttagccagttccatgtgcaacctggatgtacagttccttgactttttttctatcaacatgtattctaaagttcaatttcaaaaggaaactttagccaggtgcagtggtgcatgcctgcagtcccagccatttgggaggctgagactgaaggatcacttgagcccaggagttggaggctgcggtgagctatgatcgtgccactgcactcccccctgagattccatctctttaatttaaataaaaaaaaaggaaactatattatccacttacaaccagcattgctaacctaagataaatctgcaactgcaaaagtaaatgtaggccagacatggtggctcacacctataatcccagcactttgggaggccgaggcaggtggatcacttgaggtcgggagttcgagaccagcctgaccaacatggagaaaccccgtctctactaaaaatacaaaattagccggacgtgatggcacatgcctgtaatcccagctactcgggaggctgaggcaaaagaatttcttgaacccgggaggcagagactgctgtgagctgagatcacgccattcactccagcctgggtaacaagagagaaatgccatctcaaaaaaaaaaaaaaaaagtaaatctaacagaaaccagacaatgttgttgccttcaagctgggctctttgttaaaaggaaaattactaagtgttagggaggtgttaaaggcctattagcatctacctgaggcttcctttctcgcaaaagcagagcgtctgaaagatacgtggaaaagaaacttaaagtataataaaaaagaaagaaagaaaaagaaatgattatgcccctctgagatccaattatttaatctgtgcccctgttctgcctaaaattatctcagtgactgtccaacgtgtgtctcacacttgggggcacagccttgagatgataatgatgatgttagttttaaaaagaaaaaaaaaggttcagagttctgaatcctggagtatatctctgcctagcaggctaaaatacaattatcgtctttgttccctgaaaaatgaaaaaaatggagtcctttaaaaagcaaatggtgtgaagaatgatgtttttgcactggatactgagacccatcgtgatgggggtctctggggcagctctgctcatgacctgggaggtcactgtagggagatgttttctaggtgacctccccacccaaatactccaaccggaggcattcacgtgtcctgagaccacacgccaggcgcaggctaggggctaggacaagaatcaagattaaaggggaaatggccaggtgcggtggctcatgcctgtaatcccagcactttgggagtcaaggccagtggattacttgaggtcgggagttcgagaccagcctggccaacacggtgaaaccctgtctctactgaaaatacaaaaattagccaggtgtggtgactcatgcctgtagtcccagctattcgggaggctgaggtgggagaatcacttgaacccaggaggcagaggttgcagtaagccaagatcatgccactgcactccagcctgggcaatagagcaagactccatctcaaaaaaaaaaaaaaagattaaagggaaaatgaacacagagaagagtagattacactgtaagcctttgaagagttttctgtctaaaaccagagaccgaagaaacaaacaaagattaactccgaaatagcacataggagctggcaggagccagaggtaggcagtcaggaaatgctgtcggagggagcaacaggtaatttgggctttgaggaccgggtagttctgtgactggagaagtggaggaagggcatttctagcagcgggaacagtatatgcataagcagacagaggcaaaagaatgtggctggggcttgagatatgtagccataaatgggaatgcaaaggtgaaggtaagttggactagattttcaagagcattgaatgccatgcccagaagtttgcacttgctcttctgagaattcacgtgctccagaagaattctgagcaagagaaagagtgacaaggtcattggctttagccactgtgtgcataaaacatggaagaaaaggcagggaatgaggagcaagttgggagacgggtgaggggggatggcacccaggaatggatggcgggatgttaaggaaggtgacccactggggatggggatggggatagagggcaggcagttgaccatgactctcaggtttctggtgtggacaactggatgggtcatgagtgccatgaaccacaagctattcatggtcccactcaataccctcctcttggggggcctgagtcatggttggccaagggtgtcatggcatctctggggtctgcattgctaagctcagttccaacagaccttggactgaacttctgtgcagtcctctctggcaaagatgggctcagagacccttggagcaatgcagcagagaccatggcagcagccacatcagcatctgaaaacagcggcacccggttattttccctccttcagactcagggaatatggtgggggaggggagatttggtataagggccactttaagtatcttccagaatcccattggaagggggagaaaatcccatttttttaagagcccactgataccacctttaaaaagaatacacagggggccaggcgcagtggctcacacctgtaatcccaacactttgggaggccaaggtgggtggatcacctgaggtcaggagttcaagaccagcctggccaacatggtgaagccccatctctactaaaaatacaaaagttagctgggcatggtggcacgcacctgtagtcccagctacttggagaggctgaggcaagagaatcacttgaacctgggaggtggaggttgcagtgagccaagatcataccattgcactccagcctgggcaacaagagtgaaactccatctcaaaaaaaaaaaagaatacataggggaccactaaactcctagaccaagggcttttttgaaaatagctgtgaccaggtgtagtggctcacacctgtaatcccagcactttgagagggtgaggagggcagattgcttgagctcaggagtttgaaaccagcctgggcaacatggtgaaacctcatctctacaaaaagacaaaacaattagccaggcgcagtggcgtgtgcctgtagtcccagctacttgggaggctgaggtgggaggatggctttagcccaggaggcggaggttgcagtgagccgagatcgtgccactgcactccagccttggtgacagagccagaccctgtctcaaaaaagaaaaaagaaaagctgtgcagaaatgggggtggggaatcagccaacccccttgtgctgggtctcagggacacccaatacagctgctcaggcccagccagatggcaaagggccctcaaccaaccctgggaccagaaccacaaaaagccacgtacttactggctcccgagcccaagcttaacaggtgaaatggaccactcttcaccaggaagggcagggctgtgccaagctcaccccagacttctaggcctgggagggtagggtcccatggagctgtgggctgccccctacccaacctgacctctgcttcctctcttcccttcttcccacctaaacattcctccacagtggcaatagcaaaggaaaagacatcaacacgattaaatccctccgagtcctccgggtgctacgacctcttaaaaccatcaagcggctgccaaagctcaaggtgagattgggagatggtggggtgcggtgggggggactgtcagggttatcatgtacagctgagcaggttgtacactgctcaaggacaacacattaaaggaggtgctgataacatcctagccatcgtgtatggatatttgtattattacaacttcccagcagatggcagtaaagtgagctgacctaaaataatctgtgtattatggcagtttttctttagatgaagtgtcttggggttaagatcctttttcctaattcgcatgaaggcatcatatggatttaaaagggtataaccgtgatctgggaagcaggaactagatttcttgttccataaaattttgacttttcatctacctattctaggctctagtatctcccattccaaaatagcatgaaccagcatttcccaaaagcctgtcattcaaaaacatatatatatattaagggaaataaaatccagtcattagagcacccactttcactctatgcttcacctgggggtccccagtattatctcttatgtaatatgtttctttaaatcaagtcacacccgtaatccctgcattttgaaagaccaaggcaggagtgttgcttgagcccaggagaatgagaccagcctgggcaacatagttagactctgtctctactaaaaattaaagacagaaaacagatactgttatggaaatctaaccaaatatggctgcctgcctaaggctttgtgcattgacaactgctctttcttggttaaagagggaaaatgtcaatggtaggtgttaacatggtagcaactaagtaaaaatttctccttcactcaaaaggattgagagagttggaaaggaagtaactttgttaccttgtttttctgtgttgggctcctgtatcacttaaaagcatctctggtatcccatctgggagttttagatccatagaatgccaggattgagtccaactcctccaacgcttatttctgaaagctggggggaccttaccctagtgacttgacttatgaccttgcctgtaaaatgggaatgatcatggcagtattttggtatgatgggccactggaggcagaaggttgggcaggtccccagcccctcatgctctctgtcaactccaccccacaggctgtgtttgactgtgtggtgaactcacttaaaaacgtcttcaacatcctcatcgtctacatgctattcatgttcatcttcgccgtggtggctgtgcagctcttcaaggggaaattcttccactgcactgacgagtccaaagagtttgagaaagattgtcggtgggtctccactttccagcacattcccattggaaccagcaggtgggcaggggggaagtggctagaggcattggccacttgggctcagagactggagaagtgatgagccttggaagtgactcagttgcaaccagcttggatcttgggtagaaagaaaaccggttttagaatttgagtcaccacccagagccacagaatgagtcataagcaaattgattgacctttcagccaccgcctttgtcatgtgagggatattaatacacatccacagttccttacttgaaatcgttacaggcagatgtgtttcaaagttgagaatattttgagattcccatgtgggacatgacaccctcagctgggtctaaggcagccctataatcaaacacaatatttctgccataaaatgtgtaactatttacatcaaatggggtaaataacaagtataaagagcttcatgtccaatcagatcaggtttcattaccaaataagttaggtaagaggccaggtgcagtggctcacacctgtaattccaacactttgggaggctgaggtgggaggatcacttgaggccaggagttggagaccaggttgggcaacataatgagagcccatcctacaaaataaattttaaaagttagcggggcatggtagcacacacctgtagtcccagctacccgggaggctgaggcgggaggattgtttaaacacaggagttcaaggctgcaatgcactatgatggtaccactgcactccagcctgcgtgacagagtgagaccctgcctctcaaaaatatatacatataggccgggcgcagtggctcatgcttataatctcagcactttaggaggccgaggcgggcggatcatgaggtcaggagatcgagaccatcctggctaacacggtgaaaccctgtctctactaaaaatacaaaaacctagctgggcatggtggcagacgcctgtagtcccagctacttgggaggctgagacaggagaatggcgtgaacccgggaggcggagcttgcagtgagcccagattgggccactgtactccagtctgggcaacagagccagactccatctcaaacaaacaaacaaacaaacaacaacaacaaaaatatatatatatatatatgtatatatatatatgtacacgcacacacacatatgtattatatgtgtgtgtgtatatatatgtatgtgtatatatagtgatattgttaccagtgtaaagtggcattttgcaacacatggtagcctgttgttatcttgatggctatttattgaaattaggaggatgccagatgtctggataggagtctggaactaacccttgtttcctgccttgaaaaggagtagcaacctcccttagcctgatgaacctctaaatgtcccctatgtctctctgcctcctcctaaactccctccaccccacccccagcaagcctgaggctctcaccctgaggactagaagttatcacgttggaagagggtgctggaccctgggtcagctctcccaccaggagtaaggttgtgccatcacccatggatttatctcaaagtagatgcacacgtcatcccctatgaagcacaggaacacatggtggcaggatggggagtcactgcttcccaagcagtctaggctggtggaccactcttcctttccctccccctgtctctgataaccaaagacaagtgcaagacagcccctctttcccatttactaacagtccccactctctgtggcagaggcaaatacctcctctacgagaagaatgaggtgaaggcgcgagaccgggagtggaagaagtatgaattccattacgacaatgtgctgtgggctctgctgaccctcttcaccgtgtccacgggagaaggctggccacagtaagtggcccgactggaaatctatccaggaggagccctggggagcaggaggataaagggcctgagagcttagcaataagaaaggtcttggaggccgggcatggtggctcacgcctgtaatcccaacactttaggaggccaaggcagatgtatcacttgaggccaggagtttgagatcagcctggccatcatggcaaaactccatttctactaaaaatcccaaaaaaaaaaaaaaaaaaaaaaaaaaaaaagctgccaggcatggtggctcacacctgtggtcccggctactcaggaggctgagacacgagaatcacttgaacccaggaggcagaggttgcagtgagccgagattgcaccactgcacttcatcctgagtgacagagcaagactatggcctccccgccttcaaaaaaaaaaaaaagtgaggctgaatcatggacttagtctttatttaaaattttgagccacttgtggtggctcatacctgttatcccagctactcaggaggctgaggtgggaggatcgcttgagcccaagagttcaaggctgcagtgagctgtgattatgccattgtactccagcctagacaacagaaggagacccctatccctgaaaaaaaaaaagaagaagaaattgatatttgttcatcatggactttttgcattaattttgattttttaaaatattggagcaaaagattatcttgattactgagattttcagtacccccttaatttgcacccaaaacaaatgcctccctccctcacctcgtccaagtaatggtctttctctcagaggtcttggaaatgccaggctggaagcttggtagattccagcatgtgccctcagcatcctcacctccctccctctctcagcaaatatgccaacctgaacatgccctactacccactctcagacacatccagtactcacacatgtgggaataatgctaacccacaaggcacctttgagcaaagtttttttaaacacctttctcaacagacttcatttccatctgtctgaaaatcatcgcaatagacttaaatgattttgttcaaacaaggcactgaaggaccacctgccaaaaaattgtcatcatgaatacacaaatctatcatgcctatcatgtgaaggtatcgcttagacacagagcctttgagcagtgtgcaacctgcactactgtacagagctgctgtgcacttacccactctcatatatatccccattgtacctcctgagcacccagcaccacctgtgctcaaatacccactctacatgcatacacccacctctactccctccattgccacaacctgtctttaaatcccaacttggccacttataagtgggtggtcttcagcacgtccctttaaattgctgaacctcaagttcctcatgtgcaaagtggagccagtaataacctccctgggagggttgctgagccggtggggatgaattgttgaatattgtttccagcacacagcaagcccttcatgcacagcagtagaaatgactgacattggccaggcgtggtggctcacacctgtaatctcaacagtttgggagaccgaggcaggtggatcacctgaggtcaggagttcaagaccagcctggccaacatggtgaaaccccgtctctactaaaaatacaaaaaaattagccaggcttggtggcgcatgtctgtaatcccagctacttgggaggctgaggcaggagaatcatttgaacccgggaggcggaggttgtagtgacccaagatcacgccgttgcactccagcctgggcaacgagagcgaaactccatctcaaaaaattaaaattaaaattaagaaataactgacattgttgtcagcctttcaaaaaacagcgactacttaaatttctttttcatttccctctgttcctgttctgccatctcacttccaccctctctccaccttcctcatcaccccttgggtccctgtctctctccttcctgccccttccctctccctgccccattccttgcagggtcctcaagcattcggtggacgccacctttgagaaccagggccccagccccgggtaccgcatggagatgtccattttctacgtcgtctactttgtggtgttccccttcttctttgtcaatatctttgtggccttgatcatcatcaccttccaggagcaaggggacaagatgatggaggaatacagcctggagaaaaatgaggtgccacttccaattccatctgtcctttaaaaactggggacacacacaaactttaaaacacacacaacacccaggaacccctttctaggggtacctgggggagggaacagaagcattgtcccaaccgaatccagtcttcagggcagcccttcatggagtttccagaggaaacacatcatatagtgtatgtatcagtcagtttagactaggttatgccgcagtaacaagcaaccccagatttcattgccaaatatccacaaagggacttattttttgctcacactgcatgtcaacatcagttgtggatcttgccatctttattctggttcccaggctggcagagcagcagagcagcctccctctgagatgctccagatgaaaaagagagtatgtcagactgaggttcagttcttcaggcttgtgctcaaaaattacacatgtcacttctgctcacatttcatcagccaaagcaagtcacacatccattctgacatcagtggagtgggcaaatacaatctcccctagcgaagggtggtgaatatttatgaatgaaaagccaagccaggtgtggtggctcacacctgtaatcccaacattttgggaagctgaggcaggaggatcacttgagctcaggagtttgagaccagcctggccaacatagcaagaccccatctctactacaaatcaaaaaaattagccaggcaggatggtgcacacctttagccccagtaacatgggaggctgaggtgggaggatgcttgagcttgggagttcgaggctgcagtgagctatcattatgccactgcactacagcctgggcaacagagcaagaccctctctcaaaaaaagaaaaggaaagaaaatccagtcccctgtctaccagagagtatagacatgactctttgcctctctggcatcatccaagctaaatagaggacctagaatatatcctctgctcccttgacccttaagacttaataaccactattcctccttctctctccctcaaagagaaggagaagacgcagcaaagtattcagtaagaaagaatgggctgggcgcagtggctcacgcctgtaatcttaacactttaggaggccaaggcaggaggattgcttgagcccggaagttcaagaccagcctgagcaacatagtgagaccccatctctatgattaaaaaaaaaaagttttaattagctgggtgtggtggtgcacgcctgtagtcccagctactcaggaggctgaagcgggaggatcacttgagtccaggaggtcaaggctgcagtgagctgtgattgcactgcactccagcctgggtgacaaagcaagcccgtgtcaaagaaaaaaaaaaaaaaaggaaggagggagggagggagggaaggaaggaaatgagagagagaaagaaaggagggagggaaggaaggagatagggaagaaggaatgaagaagaaagaaagggagcgaaggaaagaaggaagaagagagaaaggaaaggagaaaggggaaagggtggaaggaatgaagggaaggaaggaaaaaggaaagtgaaggagggagggaggaaggaaggaaaggagggagggaaggagggagggaaggagggagggagggaaggagggagggagagaaggagggagggagggaaggaaggagggaggaaggaaggaaggagggagggagcgagggagggaggaaggggaagaaggattaggcttcaatttgatttggcacactcggtagctgtgtcacctcaggcaagtggtttaacctttctaagcctctattttggtgatctgcaaagtgaggccattgatagtacccacttcccatgtttgtattagccatgcaataatggggaaatgtcagtgcaagttttggcagttggtgacatctcaagcaactgtagctgttgggataagaaagcaatggtgagaaggaagagagagcccaggaatcctggctgggggcaagagaggcagagactcaagcagaagcacttgagaaccgcgacgagttagacagagggtgcccggtgtacagccaccttcctcctgcctctgccgctctcaccactggcctctctcccgcagagggcctgcattgatttcgccatcagcgccaagccgctgacccgacacatgccgcagaacaagcagagcttccagtaccgcatgtggcagttcgtggtgtctccgcctttcgagtacacgatcatggccatgatcgccctcaacaccatcgtgcttatgatgaaggtaagtgccccacaccagcccccagcactacttaacccccacctcgttcctgcctctaccctgataaaatgaaaccatctgcagtttcccagacagaccacactctggatcacctctgagattttgttcctgctgttccctctacctgacacactgttcccaccactcccccggccagcttcttcttcccagctgtacctgcagacctcttcctccagaaagccttccctgaccacccaagactgcttgaggtgcccatcttagcaggcatcctatctttatgtcgcctgccacaaaaatctgcgtcaggttgcatgacagtgtcccccacccatttatgatgacctcagccctgaattcctagaggccaacaaggatctggctcagacggaacaagaagctctctataaatgtttgattaatgaaatgagggggctgggcgcggtggctcatgcctgtaatcccagaactttgggaggccgaggcgggcggatcacctgaggtcacgagttcgagaccagcctgaccaacacggagaaaccgcatctctactaaaaatacaaaattagccaggcgtggtggtgcgcatctgtaatcccagctactcgggaggctgaggcaggagaattgcttgaacccgggaggcggaggttgccatgagccgagatagcgcaattgcactctagcctgggcaacaagagcaagactccatctcaaaaaaaaaaagaaaagaaaaagaaagaaatgagggagaaggggtaggtgaggaccctaaaatccccagggctaaggagcggcttccaaaaaaaaactctgaaaacctttcaccctgtgctttggactccaaagcgtggattcaagcccagctcttccatttaattcatttacctttgtacaagcaaccagtgactttctggggactcagtttccctgtcaataaaatgggaatgataataagagcacatttgccccctccagaggaggtgagaggattgaatgagaaagttcatgcaaggaccttagctccttctcggcacttcaaaaacgatcaatagtggccgggcaaggtggctcacacctgtaatcccagcactttgggaggtcgaggcaggcggatcacttgaggccaggtgttcgggaccaactggccaacatggtgaaatcccgtctctactaaaaatacaaaaattagctgggcgtggtggcgcatgcctataataccagctgcgtgagaggctgaggcatgagaatcgcttgaacccagggggcggaagttgcagtgagctgagatcacaccactgcactccagcctgggtaacagagtgagactccgtctcaaaaaaaataaggaagccggggacggtggctcacgcctgtaatcccagcactttgggaggccgaggagggcgatcacaaggttaggagatcaagaccatcctggctaacacggtgaaacgctgtctctactaaaaatacaaaaagttagctgggcatggtggtgggcacctgtagtcccagctacttgggaggctgaggcaggggaatggcatgaacccaggaggtggagcttgcagtgagccgagatcgcgccactgcactccagcccgggtgacagagtgagactcctcaaaaaaaaaaaaaaaaaaaaagtataattcagccaagcacaatggcgtatgcctatagtcccgactatcaggaggctaaggtaggattgtgagttcaagcccagcctgggcaaaataggaagaccccgtctaccaaaaaaaaaaaaaaaaggttgggggaggtttttgtttttttggatgtgaaaagaagagcctagtccggcggagagcggggctttcctgaactgtgcctcctaccagtgaggttgctcagaccttgcctggggctggagtgttgcctggagaacagccatgaagctgcctccccacttcccacttcccacccctgctcgctgacccctgctactcctgcttctttcccctagttctatggggcttctgttgcttatgaaaatgccctgcgggtgttcaacatcgtcttcacctccctcttctctctggaatgtgtgctgaaagtcatggcttttgggattctggtaagtaccaccttggggctacagctatgggcttgggagaagcccaagggggaacaatgggtcctggatgatggtctcccaacgtggccccaagaaccccaacctcaagggtggcttcagtatcctgccagtggccacagatcctacttaggcattcttgtgtttgccaaggagtcccagggagacccaacctgtgagtgttaccatatggctgcttatgtatccagttcctcaaaatgatgggagtcatcatggctgggagtctttagcatccattttagagataagaaaactgaaatcaggctgggcgaggtgtctcatggctgtaattccagcactttgggaggccaaggtgggcggatcacctgaggtcgggagttcgagaccagcctgaccaacatggagaaactctgtctctactaaaaatacaaaattagccgggtgtggtggcgcatgcctgtaatcccagctactcgggaggctgaggcaggagaatcgcttgaacctgggaggcagaggttgtggtgagccgagatcacatcactgcactccagcctgggcaacaagagtgaaactctgtctcaaaaaaaagaaagaaagaaagaaaactgaaatcaggctgagcacagtggctcatgcctgtaatcctagcacttcaggaggccaaggcaggaggatcgcttgaagctaggagttctcaaccagcctgggcagcaaagcaagcccctgtccctacaaaaaaaaaaaaaatttttttttaattagccaggcatggtaactcgtgcctgtagtgccagttactcaggaggctgaggtgggaagatattttgagcccaggaggtggaggttgcagtgagctatgatcatgccactgcaccccagcctgggcaacagcaagactccatctttaaaaaacaaacacagaggtcaggcacagtgactcacacctgtaatcccagcactttgggaggcagaggcaggcaaatcacttgagcctaggagttcgagaccaccctggccaacatggcaaaaccccatctctactaaaactacaaaaaattagcctggcgtgcttgtgggtgcccatgatcccagctactcaggaggctgaggcaggagaatcgcttgaacccacaaagtggaggttacagtgagctgagatcacaccactgcactccagcctgagcaacagagcaagtctcaaaaaaataataataataaaaataaatatgtctttatttttcaccagccactaactaaattttaacatttccttccatcttaaagggagataacaaacccttagtattagtattatcaacccttaatattatcaacatgacctgtgtcacttataaacatcagatattttcatactgcattataagagctgcagataccttaacatttaatttgcattcatcattgctttaaaatgttgcttgtgattaaacctacagctagaatttgttactcagtgtttttttgttgttgttctgttttgttttgtttgagacagtctcgctgttgcccaggctggagtgcagtggcgcaatctcggctcactgaaagctccaccccctgggttcacgccattctcctgcctcagcctcccgagtagctgggactacaggtgcctgccaccacacctggctaattgtttgtatttttagtagagatggggtttcaccatgttggccaggatggtcttgatttcctgacctcatgatccgcccgcctcggcctcccaaagtgctgggattacaggcgggagccaccgcacccggcctactcagtgtgttaatggagaagtatattcattgttagatcgccatttttaaaactttttttttttttttgagacacagtcttgctctgttgcccaagctggagtaccgtggcacaatcttggctcactgaaacctccacctcctgggttcaagcgattctcccatctcagccttctgagtagctgggactacagatgcacaccagcatgccaggctaatttttatatttttagtagagacggggtttcaccatgttggccaggctggtctcgaactcctggcatcaagcaatctgcctgcttcagcctcccaaaatgctgggattacaggcatgagacactgtgcctagccttaaaaaatattttgatagctattttattacaaaaggtaaccttgaagcccttgctattttgttatgcatttacaagcctttatgcataaaataaaatagccagcactattctcacatggccaaggttcatagcacacacacaaaagtatagttggctgagtgcggtggctcacacctgtaatcccaacactttgggagacagaggtgggtggatcatgaggtcaagagatccagaccacccttgccaacatggtgaaaccccatctctactaaaaagtacaaaaattagctgggtgtggtggcgcatgcctgtagtctcagctactcgggaggctgaggcaggagaatcatttgaacgtgggaggcggaggttgcagtgagccgagatcttgccactgcactccagcctgggtgacagagtgagactccatctcaataaataaataaattaaattaaattaaattaaaattattttttaaaaaattgggggctgagtgtgatggctcacacctgtaatcccggcagtttgggagcttgaggagggcagatcccttgaggtcaggagttcaagaccagcctggacaacatggtgaaaccccgtctctactaaaaatacaaaaattagccaggcatggtggcgtgtgcctgtaatcccagctactcgtgaggctgaggcccaagcatcgcttgaacctgtgaggcggaggttgcagtgagccaagatggcaccagtgcactccagcctgggtgacagagtgagactttgtctcaaaaaaaaaaaaaaattaaggtgaagaaggcttatactagtgggctgggacttgaagtgaagtgaattcttgaaggtccccagtgagtggccaaggtgggacttgaaccaggacatctgttctcttgaccaccagcttagtccatccctttgaagagagtgacctacagtctgggtctcagccagggtctcaggaaaccaggttcccaccttggctcacggaggtggttaggggcatcagctttagcaccagagttcagatcttgcctcgtcctatataagctttgtcacctccccatcattaaaaggagccatcctccccctccacctcagcagagccctggtaaacagcaaatggactaacgtgcatctagagggttgaggatgaagcctggcctggcatgggcactcaataaatgctaggggccaggcacggtggctgacacctgtaatcgcagcactttgggaggctgaggcaggtggatcgcttgagcccaggagtctgagaccaacctggacaacatagtgagattctgtctctacaaaaagtacaaaattagcctggtgtggtggcgtgcacctgcagtcccatctacttaggaggctgaggtgagaggatggattcagcccaggatgtcagggctgcagtgagtcgtgattgagccgctgcaccccaccctgggtgacagagcaagaccctgtatcaaaataaataaataaatgctaggaaagggatcctactaatggacctttttcctccaaaacagtggctttcatttggtggagatgctacttattagaagcacttgaggccaggtgtggtggctcatgcctgtagtcccagcactttgggacttctgccaaggcagaagaattgcttgaacccaggcgtttcagaccagcctgggcaacatagcaagacctcatctctagaaaacattgaaaaattagccagcatagtggcacatgactgttgtcctaactacttaggcgaaggcaggaggattacttgagctcaggagttcaaggctgcagtgagctgcgatcacatcactgccctccagcctgagcaacaacacaagacccggactctaaaaatcaaaaaagaagcacttagggaaatttcttaaaattaaatgataccctgagcaaacccctagatgttctgattcatttggtttggtgaggtgggagggaatcactgaatctgtaatttattattatttttttttttttgagatggattctcactctgttgcccaggctggagtgcagtggtgcaatcttggctcactgcaacctctgcttcccgggttcaagcaattgtcctgcctcagcctcccgactagttgggattacaggcgcccaccatcacgcccggctaatttttgtatttttagcagagacggggattcaccacgtcagccaggttggtctccaactcctgacctcaggtgatccgcctgcctcggcctcccaaagtgctgggattataggcatgagccaccgtacctagcctgcagttattttattctgagttgatcttctgctggtgaagtgagtcttccactggggcctggagctgcatctccctcaccctgccaatcctgcaagagccagcactgagcttcccctctgctttctcttttttttttttttttttttttttgagatgggatcttactctgttgcccagcctgttcttgaactcgtggcctcaagcagttctccctccttggcctcccaaagtgctggaattataggcatgagccaccacgcctggtctcccctttcagttttaaatgaagccacaagttccctgtataacatttgggagatagaggggagctctctagcctaggggttgaggtctgtgaccaaacgcctataaagttgtctttgtttggactcccccagaagcagagcctgagacaaggattgagtgcaaggaatttatctgggatgcagggcagtaagggagagaggaagtgacacagggacagaaaggcaaccaggaaagagtgtattattaagccagttcctgctgtgaacaaatggggctcagtttcagtggatacctccaggaggcaacagagagcacataccacagagtcatcccacctcacagggagggaattggagtatttatcctccagtgcccatcagacataatcacaggccactcccaggggagctattaattccctaacacttgtgcagccacagagagaccctgggcaaagtagtgtacctcaggtgtgtagttgagctatgggcagggccccagcaacacctgccaaaatgccaaaagtgccagtgggacctgaattcctttttatttatttatttatttatttatttatttttatttatttatttttgacggagtctcgctctgtggcccaggctggagtgcagtggtgcaatctctgctcactgcaagctctgcctcccaggttcacgccattctcctgcctcagcctccggagtagctgggactacaggcgcgcaccaccacgcctgcctgatttttgtgtgcgtgtatttttagtagagatggggattcaccatgttatccaggatggtcttgatctcctgacctcgtgatccgcccacatcggcctcccaaagtgctgggattgcaggcgtgagccaccgcgcccggccccctgaattccttttttaggcagttgtgaaacaacaacatcccatctgttgggcacctactgtatattccatgctcagcgacgcacattcattgtctgattgctgtgttaccactgccttccagagaagggcgcagaggccccaggcacttcgcctaggagggaagcacagctctaaggtcaggctccttctctgtaaggtagaggggctacttcagggtcacactgaccgccccaacccctgacctggcctctgcttctgcgaagatgctgagaaggccctgtgttttgtgttttgggtcccactgaccccagaggggagggccatctctttgacccagactcttggatccaaactggggtgccacccatcaccatgtcagtacccggttgaggggagtcagagatagcaggagaccttgtgggacttgaggctgtgactgttctccaaacaatgtggagtatttccatattttaacaaaagagaggccaggcgtggtggctcacgcctgtaatcccagcactttgggaggccgaggcggatggatcacaacgtcaggagatcaagatcatcctggctaacatggtgaaaccccgtctctactaaaaaatacaaaaaattagccaggcgtggtggtgggcgcctgtagtcccagctactcaggagactgaagcaggagaatggtgtgaacccgggaggcagagcttgtagtgagccgagaacgtgccactgcactccagcctgggcgacagagtgagactctgtctcaaaaaaaaaaaacaaacagagaggttatgcttgtgtttccccttgagccagcacccagcccaggaatgcagcagtcaggatagatcaagtgaagctgcagtaacaaacagcccccacatctcagtgacttaaattgatgggaagggttttttacattcagcagggaagctgtttgcctcatagttacccagggacccaggctcacagagtagctgccattcaaaatgttactggtcgccaagcccagggttgagaggctagagagtccaacactgaccagaaagtgaccacactgcttccacacacagcacatcactgcacctagacacacatggccccatctaaacacaaggggaccaggaagtgcgtgtgcctgaaaggccccaaagccccgtccagtgcctgttctgcaccctgttactgtccgcctccagatcaggaaatggaggcccagagaggttaagccacttgcccatagccacacagctgtggtagcagagctgggatttgaacccagagtctcctttctttgcgagtatgctgccaacctagtggggacctgaacacagactgtgggctctctgaggcctgggttcaaatcctggctttacatctctgtgctgctagcctcaggcagatgagtggcttggttacctcctagaaaatgggtatacctgggagtggtggctcacgcctataatcccaacactttggaaggccaaagtgagcagatcacttgaggtcagaagttcgagaccagcctgaccaacatggtgaaaccccgtctctactaaaaatacaaaaattagctgggtgtggtggcatgcacctgtggtcctacctacttgggaggctgaggcaggagaatcgcttgaacccaggaggcagaggttacagtgagccgagatcgtgccactgcactccagcctggatgactgagcgagactccatctcaaaaaaaaaaaaaaaaaagagaaagaaagaaaaagaaaatgggtgataacccttccctccaggatcttcatgaggagctcagtgatgtcatttataaagcccctggggtctcgggagccctcaaaaatgctggagagacaggccacagctctgaagagcagccccagccctgtggagctgaagcagggtctggaggccccctctggggccaggccaatcatgggaaggcccccaggagttcccagggagggagactcagcacagatgatgtcgaacagcctttaccgcagcccttcgaacaaccataactgtcccgggcactccgctgatgggcaactgtgcctctaacatgcacccggccagcctagggggccgggaaccaagccctctgttggcatctctgtcttgtgggtccccattctagaattatttccgcgatgcctggaacatcttcgactttgtgactgttctgggcagcatcaccgatatcctcgtgactgagtttggggtaagtctccctccagcttctctctgggtgactctgggctggacgaggcaggcggcagggggcgggggagcggtcccagaggcagtgtgtcccggaagccatagctgcttgagccagcacttggccatgaccagagagggagaactggggccccggggacaagggcagcccctcaggagggcattgtggggagatgggggtaaccaaagcttggctgtagggccagcactgaggggtgggctttcctgcatcctggcctaggaattaataatgcagatgagtacactgagggaactgagacactcaaaagctctgaaagctgagccggctcccaaacaccaccctatgtcaggagcccagaaagaatgggtttcaagtcaattctgtttgaaccaaccctctcctagttagtgggcaggagagagccacagccctcaggccagtgtggggacaccactcccagggccatagaggggtccccagggtgtcttccctcctctagccccgggcctgggagactctcaacatgggagtctctggacctctctgtggtggccccacaggccacattgcccttctccttttctggaagactcagggccccagaggtcctgtcctagaccctctccttggccatctgccaatgagcccaggcttggggtccctcaggagattggggggagggtagaagatccttgcagggggaagcaatggtcaaaaaagggtgtcaaagccaagggtcaagggtgataccaatgtcatcttactaacaataaaaataacaatagctcacgagaatcgcagccttgctgtgtgccagggaactgtgccaagtggtttacgtggattggctcagggtagaggtcttggtctcagctcgtaagagaattccctcggagggttcaactgaaggcacccaaatgcagacctcactggtggaggggaagggaagggtacccacaagggtggcaaggtgtccagcgaccacccaccgtggggagctgtcacctgcccaggtgctgaagtggggagggaacctgagccggaggccaggagaagccaccaagtgggagctgtcctgtcaatgtggagagacagagaccagggcccaagcaggcagagagcaataggggagaaacaccccaacctttctctcccctcatcccttatctcctgccagagcctcccatggcccaaagtaaaccggaagcaagctgaatatgatgctcagagcaggcagggaagtcaggagaatagatctgggtgtggtcgggcctgaggaagagggtgttgcctcatttcacagatgggaaaactgacctcagctgggcacggtggctcatgcctgtaatcccagcactttgggaggccgaagccggcggatcacctgaggccaggagttcaagaccagcctggccaacatggtgaaaccccatctctactgacaatacaaaaaaattagccaggtgtggtggtgcatgcctgtaatcccagctactcgggaggctgaggcaggaaaattgcttgaacccggaaggcggaggttgcagtgagcgacggtcataccattgcactccagcctgggtgacaagagcgaaaactccatctcaaaaaaaaaaagaaagaaagaaaactgatcttcaatgcctggggaagtgagagacactcccaaggtcacaaagccaggcctgggtgactcctgagagtacactgacagctcctggggtgtcccagtcagatccccctacagaaaaggatctgtttgcctgctcttccgtcctagaaggccaggaggggctggggaactacacaaaagagggggccattctttgatatgtcctacggcacccgcacccaagtgatacacacttatttgccttcagctccagtgagccagaattttccccttcccctcaccctatccctgaaaccttcctctagagggttcttgcccacatgggggctctctccactggggtgcccccacctggtcattctcccctgtcctgagtttctagagagggctggagctccagctggcaatcaaaatatcttgccatccggctacatacaagacagccttgaaccaatgtccctttgggtcaagaggttagaaggatggtccagctccccagaagggcaggtggggtggaggaagttagctgaaaccttcaatcaccagtaagagagctgtagggacagactccaacagcctgttctcctggctggcaggaagatggggcatggggtgttcatgggacatcaggacccttgcagtagccaaacagcccccagccctccctaccagctgtttgatcttggacaacttgcgctatctcttctcatgtagagtggggctaaccattgcaaccaacctcagacacttgcaagactcacagtgatgcatgcactcaaaagacattcattgagcacctactgtgtgcctggtgtgattataagtgctggagacagaacgagaaggaggggtgccaaacaaaacagaccaagaatacagagtgtctgctcccatagagctgacattctaaggagagagacgggaactttttacaagtaaaagcatcaacaggccgggcatggtggctcacgcctgtaatctcagcactttgggagaccaaggcaggtggatcacttgaggtcaggagttcgagaccagcctggccaacatggtgaaactctgtccctactaaaaatacaaaaattagccgggcacggtggcaggtgcctgtaatcccagctactcaggaggctgaggcaagagaatcacttgattctcaggaggcgagaggttgtagtaagccaagattgtgccactgccctccagcctgggcgacagagtgaaactctgtctcaaaaagaaaaggaagaaaaagaaagaaagaaacgtgaagtgcttggcacagaacctgccaggaaaccaggagtttgaaaatggtggttgttaactattactgctgttgttattgttattgtgaatgggtgtgtagttttgttagccagccctgagttacagtcaatttgagggaaagatagggggtgggtgtttgggtccttctgggacaattaactcccaacctggagtagggagaggcatgtcctggcaggcaaggaggtctcagttgcccctttctgcctcccaggtaagcccactagttctgaggccagggcttggccaggctgagacaggaaatgccagatgcttgggcgggcaggtccctggggtttagggggcagagggcatgcggcagtactaaccagtgctgtctcagctgctgcccccaagtggctggggtgatgtgggtttgccctgtgtgcaatggataatgactgtgtttcttgtcttgtctcttttcatgcctgctcttaaaactgtatattggcgcaacgccgtctgaaaaactcatccaatcaaaatgcactatgaaattcatttgttcatccatgacatggtctgtgtgttcatacaccaatgacttatctcccaacccaccgccaccaccacccccactccccgcccgggaaccgaaacccattggttttttggcactggttacaaatcaacctaaaaaatgctgaacacgcctccccaactgcccccgcccgcccgctccccctcatcttcaacatctgcatctagaatccggttggtcttacttctttctgaagtctaaatgccttacattaactgtgaacgcatctcctcgcgtcggcattgcatgccacaccctgcctctccaacgtgggatgcctgacgctctcctcaaccctccgctctcctctgtctgtctgtcctcccgcccccagcccctgtgcctcccacttcctgtagactctgtctctctgtttttatcgggttctgaatgggggttttctgtttggggtggtttgcgtcttttgcagagaaagggatgggttttcccagcgcagcacctctctcttgccccatcccgcacacacatcccctacactcagagacaatagaggcaaatccactcccagccacctctcaccactcctgtcccccattcagctccatggaccccaggccccaggaaagctgccaactgtctcctcgcccctccagctctctccatcctgctgtccccaatcctccatctcaagcccacaagatctttggccttgaccagcagagacttgactctccaagtctgataaaggagacctgaaggccaggcagtgtgccggcaaagactctcaggcagaggaactcagaagtgccagacttggatctggtagcttcatgtggggctggcccactgaggccctctcctggagccttgaactgtacgtgcacacgcagtcacacagtcactgcacacagacactgcacacacagtcactgtgcacacactcagtcactgcgcacacactgtgcacacagtcactgcacacagacgctgcacgcagtcactgcagtcactgcacacagtcactatgcacacacagtcactgcacacagacactgcacacacagtcactatccacacacacagtcactgcgcagacactgcacacacactgcacacacacaatcactgcgcacacacagtcactgcacgcagaaactggacacacagtcactatgcacacactgcacacaccactatgcacacacactgtgcacagtcactatgtacacacactggcactgcatgtagtcactatggacacacactgcacagtcactgtgcacacatacactgcacacactgtcactatgcaaacacagtcactgcacacagtcactatgcacacacactgcacacacagtcactgcacacagagccactatgcatgcacacacagtctgcattcacacattgaacacacagtcgctatacacacacagtcactgcacacacagtctatgcacccacacactgaacacacagtcactgcatgtacagacactgcacatagtcatgacctcttctctttttctcactcattctccaattctctctctctctcgctcttttttttttttttttttagacagagtctcgctctgtcacccaggctggcgtgcagtggcacaatgtcagctaactgcaacctctgcctccccgtttcaagcaattatgatgcctcagcctcctgagtacctgggattacaagcatgtaccaccacgccaggccacttcttgtatttttagtagagacagggtttcaccatgttggccaggctggtctcgaactcctgacctcaagtgatgcacccgcctcagcctcccaaagtgttgggattacaggtgtgagccactacacctggcctctaatcctcattcactgttcctgtctctgtgtctctcacatacagtcatgcatgcatgcacgcatgcacacacacacacactggccctctctgctacatctacccaccctgtacccccactccagtacatactgcacacatctctctccctcccccacttctcagccccttgcacaccccttgttctgttaaatctcaactgcctctgcccctctcctacccaccaatgaggcccttagagggacgccccaatggcatctttgccctggaatcatcccttccctgctggcaatacacatgcattcacccaccaaacatttaatgagcccctatttggtgccacagatggaattatgggcagaagcagacaccattactgtcccctcttaccacatacagtcaggtgggggaggcaggcatcggtcaaataaccccttgactccacttaaaattatacctgcactgcgagctgaaggatgagcagcattaacaaggcagagagagatgcacagagcattccaggcccaggacagcacatgcaaaggccctgtggtgggacggaacctgtgaggggtcaggatctgcaagcgagggaatgtggctgatgcaaagacagccgagaaaggctggcctggagacagccgaagaaggcagaaggggacaggacccggggctggggagggcggggctatattgtggaatatgggctttctcctaagcaccaggaagggcctgggaggataggaagcaggggaggcgcgactggtcatgtgactagacaagctcgctctggttgcagggcagggaacagcttgacaggaggctgggctggaggtgggcaccaggaatcgcagcaagagatgacagtggaggagagagaacagtgggagggttgtcctctgcaggacccagggaaagatcaggtctgaactgagatgaggtgcctgggagcagtcgggtctggcttaaaactgggagataggctgagcacggtgactcaagcctctaatcccagcactttgggaggctgaggcaggaagatcacctgaggtcaggagttcgagaccagcctgaccaacatggtgaaaccccatctctcctaaaaaatacaaaaattagccaggcgtggtggcaggtgcctgtaatcccagatcctcaggaggccgagacaggagaatcacttaaacctgggaggtggaggttgcagtgagccgaggtcgtgccattgcactccagcctgggcaacagagtgagactctcttaaaaaaaaaatactgggtgatagaggtgagcgagtgcaaggaaaggaccaggttgggggaagagaataggtgtgggcatagcaagtttgaggtgcctttaggacatcccgaaataagtcagataggcaggtgttgtgggggctgcagcttggagctgaggtctacaagtagtaggacttttctggagcccttaggtgggtggtctccatatccttctgagcacttgaggaacatctgagcacagcactggaaaagaaaagaccacaaggacgctgtcctcatgtcttccaggggctgtgtcccacccccatcacattctagccaggaagttcaggggaggtgttgaagagaggaagctgcacctcccaagccatggattgaaatgtggaaggcaggaagagggaacttgtcagaagttctgggggcagtggaaagaattggtactgatgcaggaagagatggagggtggatgagggcagactagtacccttcccccactgccccaaacccttcccgtctccacccctacctgcctcatgtgtctcctcccccacttggctccaagaagggaagcatgttttctgcacgcatctccctgccagatccctggcttttttgcatggttgcaagcttcccctgctctcctccaaacccccctcctgaggctgcttccagggtccgcctgccttcgcatgcctggccgagtccacatgttatgatccgccccatgaaagggatggcttgtactctggggttgaacgggagggggctggggatacctgagccatcggccccatccccaggtggagctgggtggccaggcagggatgggggtcagggcagcagggcacagagagtgactctgttagccaagctgggtttggggcttgttcgaggcactggagacattctcacagcacttgagcccagtgtggtcagggtaggatcccccagcccccttccccatcctagaggcctaaggacgcactgatgtgtcccagagagcatcctagacattgccatcaaacccagaggcctcagaaattccttgaactccagtccttgcctctcagctcccaggccaaagccagcacaagacacagatctggcagccagaaagccctctggaagccaccaagtaggatgcccatgtcacccaaactaggacacttttgaaacaggagggaggctgtgactgtatggtcaccctgtgccatttggggggtgaaggttagaccaagttaaatcttgctacgtggcctgtagcaaatcctacaaatcccatagaacaagtctgattaagccccttcccttagtgtggagagaccctctactcctcctgccttcaccctgctgggtactggccagcgaaggagggtttccatgtctgcctgaggctggggtctcaaactcaaatgcctctgggggccaggcagacaccagtcaaccaggaaagcaagtgccatttctaaaacgtgaggaccctggaaaactggagatcatgtggcctgcttccagggagcaatcgcagcaggcctggggttgccagaaagccagattggtgggcaaaatctcttgatttttaaacaatggcaataatttttaattaaaaacaaggacaaatgaaaaaacactgctcgggcccaacaaaacagttttattagctagatttggcccactcgtgacttcgagagtcccaccccccccaccaaggtcccttgaagccccacaatggccacttaactctagctggtctcctccctgactctccaactctctggccccctggttcttctagcttgggtgggaggaggcagaggcagtgactagacagggggtttttgagcagaggcagtggccacccagggaggtcctgggggcagggatggccccacctcccggcccccagcacccgccccttggtgggcccgggctgatttctgagctcacccacccatgggagctgagtgcttcctgcttcctgcaggcctggtcccgtgctactccacccagccccagaagctgagaagccatccctgagaggggggaaaagggccccaaatgcatcttctccgactcagcgggcagcgaggactcaccctgcagccgaacagtcccagctccctcccgtcctccccattcccgctcgccaagggggtaagaaaagatgctcttccgcttctcccaattggctcgagccgctgctcctcttggccgtggggtgaggtcagggcgggcaggagcgggtgggcagctcggcagggcagggcagggcagggtgcccggtgagtcccgtgacagatgcatttctggcccggagcgtaacatgccctcggaacccgcacatgtccaccaggcctgactgtgctggcgacctccacccccacccccgccctggtgtttgtgcatcgtacacgtatgatagattccgcaacttgaccggcttgtgtcctttcgtctcagtgcatttggttgttgggagaaacaaaaaccatctcgatttttttcctgattggatgattcggatatattttctttttcttgttcttttgttatttcttccccatccccgttcctttttcctcctttctttttcttttcttttccccattgtgggtggggctggcagggagggcttatgcttttgagttgatgccttttcctccctcccaccctctctctcccaacattattcctttttcgagtttttcctctgcatcattgcattaatagtgctttctctctccctccttatttggggtctggcttgcttttttcctgttggttggcttcatgtaggggcctctgtgagtggtgacagctctgagccttttggggtgggtggatggtcacccctcttcctccatctccccagaataacttcatcaacctgagctttctccgcctcttccgagctgcccggctcatcaaacttctccgtcagggttacaccatccgcattcttctctggacctttgtgcagtccttcaaggtgagtcctcgtccctgctgctggcccagggctgagaagacaggtgaccctcatgctctggctgaatgtagaagtcagattggaagtgcctctgtgatgtagtcgtgcagagaatctgttatctccaaggctgttgtcaaacttcctgtccctggtgtgtcttcagagctgtaagggcctcatcctagagcccccagagatgcccaccagccctggaaggactctggcacgtggcatatggccacccaacccagtggggcagagcactgggacaagggaggaagacagtgcggctgagggacccccagcactcttcttcattgccttttttcccaccaggccctgccttatgtctgtctgctgatcgccatgctcttcttcatctatgccatcattgggatgcaggtgagtgtcgtgtccctaaggttcccagagcctcccaaggagggcagccacccttagaaaggggtgggtcagaggagcctggttcacagaagcagccatggaggttgagctgggtttcccagaagccactggaggaatggcagcccctggtcgtcaccctccaattccacaggtgtttggtaacattggcatcgacgtggaggacgaggacagtgatgaagatgagttccaaatcactgagcacaataacttccggaccttcttccaggccctcatgcttctcttccggtgagaaggggacctgctctgataattctgtttccgtggggtggggtgcctgccttcatccttctgttcccatagaggatgtaccctcctcttccaatgcaagacgtgccctcctccttctcttctggcaggggcgcgccctcacccttcttttccggtagggggcgtgcccttctcttccggtaggggacgtgccggccttctcttccgatagggggcgtgccctcctcctccttttctggtgtgggggtggccagatgtgctcttatccttcttttcccgtgaggctggaaatgggtgtcgtggggggcccaggaatcctagcagggcagaagcagagggccctgggacatagtcatcaaggtcattttccaggcattatctctgaatcttcctgaccaccctgtgaggaagggattcttggcagccctatccgacaaataagaaaacaggcttacagaccgtgaggcttgattctttggttcatcatcttggctgcacacaaaagttccttcactcgttcagtgtaggttttttgggggggctttttttttttttttttttttttttggagatggagtctcgctctgttccccaggctggagtacagtggcgcgatctcggctcactgcaagctccgcctcccgggttcacgccattctcctgcctcagcctcccgagtagctgggactacaggcgcccgccaccacgcccagataatttttttgtatttttagtagagtcggggtttcaccatgttagccaggatggtctcgatctcctgacctcgtgatccgcccgcctcggcctcccaaagtgctgggattacaggcgtgagccaccgtgcccagcccttttttttttttttttttagatggagtctctctctgttgcccaggctggagtgcagtggcgccatctcggctcactgcaagctcctcttgtggaggtgtattgagcacctacagcatgccaggcagggctgaaaaacgaggatgcaccaggaaatagagaaaagagacattttaagcactttggaagctaacatccccatggggaagacgaataatcaggaaacaaattatagaggatgctggaaaaagataaaattcaagaataaaggggaatagggccaggtgcagtgactcgtgcctgtaatcctagcattttgggaggccgaggtgggaggatcgctttagcccaggagtttgagaccagcctgggcaacatagtgagaccccgtctctacaaaaaaattgtttttaattaactgggcatagtgccacacacctgtagtcccagctacttgggaggctgaggcaggaggattgctcgagcccaggagttccaggctacagtaagctatgattgtgccactgcactccagcctcggcaacagagcgagactctgtctctaaaaagaaaaatatatttttttaatttttaaaaaaagttacagaggtagatagtggtgatagttgcataataatgtgagcttacttaatgctactgaattgtacacttcaaaatggttaaattgataaacttcatgctgtgtgtattttgccacagtaaaaaataataatgtttttaatctaacaacaaaaaaagaatagagggccggcaggttatgcctctctgaaagtgtgacatttgagagaaattggcaagggagggagtcagtgggtatatggggaagggcaggccaagccgaggggactgcctgtgtaaaggccctgaggcaggagtatggctggcatgtttgaggactgtgaggagcccagcatacctagaacagagtgatctagggagaatatagtatgagatgactgtcaccttcatggaggggagcttttttttttttttaatctgagacagagtttcggtcttgttgcccaggctggagtgcagtggtgcgatctcggctcggcgcaacttctgcctcccaggttcaagcagttctcctgcctcagcctcccgagtagctgagattataggtgcccgtcaccacgcccagctaatttttgtatttttagtagagacggggttttgccatgttggtcaggccgttctcaaactcctgacctcaggtgatccacccgcctcagccacccaaagtgctgggattacaggcatgagccactgcacccggcctgaagggagcttttttttttttttgcttttttttgagacagaatctccctctttgtcacccaggctggagtgcagtggcgcgatctcagctcactgcaacctccgcctcctgggttcaagcgattttcctgcctcagcctcccaagtagctgagactacaggtgagcgccaccacaccgagcaaatttttggtatttttagtagagatagggtttcaccatgttagccaggatggtctcaatctcctgacctcgtgatccacccacctcagcctcccaaagtgctgggattacaggtgtgagccaccgcgcccagccaagaggggagcttttaaagcataacagtgaccagcctgagcaatgcagtgaaaccccatctctacaaaaaaaaatagtttaaaaattagccaggagtggtggcgtgtgcctgtagtccccagctactcaggaggccgaggcgggaggatcacctgagcctgggaagttgaggctgcagtgagcagtgattgtgccactacactccaacctgggtaacagagcaagaccctgtcaaaaaaaaaaaagagagagagagagaaaagaaaggaaaagaaagagagagagaaggaaaagaaaagaaaaaaacatatcagtgtcctcaaatcccaccctagaccaactgaatccaagtctgctggggtggggcacgggcattggtattttttcaaagctctctgtggacttcagtgcacagccaagaatgtgaattcccttctctcagctcccagtaaaaggaggtggtccacctggggcttgcctggccagctccagagcccaagtgctcaacgtgtgtgctccacctcctggggaggcgttggtacccagtcagggctgggtgtccgagtctctgatttctccctgtcctcaggagtgccaccggggaagcttggcacaacatcatgctttcctgcctcagcgggaaaccgtgtgataagaactctggcatcctgactcgagagtgtggcaatgaatttgcttatttttactttgtttccttcatcttcctctgctcgtttctggtgagtctgtggacactgtgagggccgtctgggctccctaagcctggcttcctttcaggggagtgggtttctgtggaatgtggctgtgtcgaaggcttgttccctccaaggcttctctgaaccagcctgggatcaggtgaccctgagcgtctcaaactcagcactgttgacatttgggggtggctgattctttggggtggggccatcatgtgcactgcagtgtatggcagcatccctgtcctccccccaccagatgctggcagcacacgccacccgttcctcctgttgtgacaaccaaaaatgtctccggacattgccaggtgcccccagggggtgggggtggggttgggagtgggggccagaattcccccatttgagactcaatgaaatatttcagctgggcgtagtggccgatgcctgtaatcccaacacttcgggaggctgaggtgggagggtcacttgagcccaggaatacaagaccagcctggacagcatggtgtgaaacccatctctttaaaaaaaaaaaaaaaaattgaattagctgcacacgtggtgctgtgcacctgcagtcccagctactcaggaggctgaggtgggaggatcacttgagccttggaggtcgaggctgcagtgagccatgatcacaccactgcaccccagccagggcgacagaatgagatcctgtctcaaaaacaaacaaaaacaaacaaaaaaaaaaaaaacattgcgagggaagaaatacctcactttggccttgttgggggcagatgtgggaggatttggggtcacagtggttctcttggtgttggtccctgtttcagaagcctcccctccctctcactgactctgtttctttccatcattcttggtctttgtctctctctctcttttttttttttctttgaaatggagtctcactctgttgcccaggctaaagtgcagtggcgagacctcagctcactgcagcctccacctcccaggttcaaccgattcttcagcttcaacctcccaagtagctgggattacaggtgcacatgccaccacacccagctaatttttgtatttttagtagagacagtgtttcaccatgttgaccaggctggtctcaaactcctgacctcaagtgatctgtccacctcggcctcccaaagtgctgggattacaggcgtgatccaccgtgcccggccagtctttgtctctttgtatctctctctctccatctctctctgtttctctcttcctcttccccatctctccacttgatctctctctcactggacctccttgtgtgagtgagcatcacctctccattccccagtctctttctgtctctgtctcatttcctttccccatcttctctctatccctctctccatctgggcctctgtgtacatgtctttgggtctgtctgtccgtctgtctgtctgtatccttctcactcactcattcattccctcggtctctgcccccattctctcttggtccccggggtccccacagatgctgaatctctttgtcgccgtcatcatggacaactttgagtacctcacccgagactcctccatcctgggcccccaccacctggatgagtacgtgcgtgtctgggccgagtatgaccccgcagcttggtaagaagtcaccccgaatcctccagccacaatactcacctctccctggaactggaacacgggctaggtcaggccccagactctggagcactgaactcctggggtcctagcaggggtctcacaggttcagtcaggagagaagatataagaatcatcacccttgcataccccagattaaacacgtagggtgccaaccctgcccaaaccctggactttctgggaaatgagggagggcgtcaaccatgagatgtcctgaagagccctctcctcctacgagtctctcctgtctctcactgtgaagtctccagatggtgaggatgcattagccaggctccagggagaaaaccaacagcatcccagcctcagttctcttgagagtgtggggaggagggctggcctacccttggcagacaggattggcagcaacatcagagtagcagaactcagctcccactgggacccgtgaacctgggagtgagaggacatacaggccaggggaggacgcagagcctcaggggcccatgcatctttgtggccacaaagggagtgggcgctcccatctgggtagacaccagaggggtccctctccactgacgggcaatggtttcagagggtgggttccaccttgtgcacgtgtattgagtgcccacccaacaccaagccttgaaggacactcagaggctttatctgaatacctggaacccaccagccactaactgaggatttagttcaggctggtcttggggcctgaagaagcattactggggggccctcagcagcctaagccccatcttcctctggcctcagcaccagagaggaggccgtcacgaggaaggtgggcaggaggtggtcttggctattcccatagcctcaaacaagtactccatgagaccgagaggctggggagagccgtgggtctggggctgggctttggctggttcctaactcttcctcttttgattttaggtcacagcaattggatgctgtccccaaggcctctattccacaagcccccccccacccctgtagcccatgtagactgtggaggaggcagatgcagagagagccccaggggaggtgccctgcagtcccgaactcgactgacatcctacacccctgggtctccccagtgtctgggaatgtactggggaccttcacttgtccccagtctctcccactccttcaagccagggacaccccagcctcgggcatcatgacctcgctgtgtgcccagggagcccgtgtgaacccattgcctgcactaaccccctttcttctcctttcagcggtcggattcattataaggatatgtacagtttattacgagtaatatctccccctctcggcttaggcaagaaatgtcctcatagggttgcttgcaaggtttgacttccactaaaacctgctagcatccatggaatgagtgtggcttggggttcttcaatatatatatttcatatatatatatatatatatctctctctctctctaaaaaaacagagccatctctctttcttgcattaaactagaaaactctcttagccaacagaatgcagtcatgtagactcgataaagcatggaacatatttcctccttcccttcagccttcagccatctttgcttgctcttagctgaagctgcccatcctggggtctccacggcaccccaaatcagatacatcccctgggggattgtaactttgcatttctcccccaaccatcacctccactctctccccctccacccctcacctcccaaagcccctagccctcctcccctccctggcactggcccctgctccccacctaggccccctcagagaccagcctcagccaaaccagagaacgtgacccaactgtagaaataacagtgatggccgggcgcagtggctcatgcctgtaatcccagcactttgggaggccaaagcaggaggatcgcttgagcccaggagtttgagaccagcctgggcaacatagcaagaacccccttctctataaaaaattagccaggcattgtggcgcatgcctgtagtcccagctacttgggaggctgaggcagaaggattgcttgagcccaggaggtggaggctgcagtgagctatgatcacaccactgcactccaacccaggcgacagagagagaccctgtctctttaaaaaaaaaaaaaaaaaaaaaaaaaggcaatgaacaaaagcatggctctacgtcttccaaagtgagaattctccctcccctccgcatccctccagaactgtagctcagagcccacgctgaatctgacttttctcttttctctctctctccctgctcccgagcagtgaagtaatctttttttactgaccttttcttccattttttttcctcctcttttccattgatttgaaatatctattttatcattctctgcatctttctctctctattttttcggctcgtgtggatttcttttttctttcttctgtttctccccacctctcttcctttggttctctgttcccattcccgttttgtttttttgtttttgtttttgtttttttcattttcggtgctgccaggggccgcatgccttacctggacatgtatcagatgctgagacacatgtctccgcccctgggtctggggaagaagtgtccggccagagtggcttacaaggtagactacccttgccgaccaccgacgtccaggcactgggtttttttttcttcttcttcttctttttttttagtgctgaccagaaacacccggccgactctctttttccaacgtttctcttcttttttgtttttgattcttttttttcttttctcgagtcaactgatcatgaccatcccttgattctaagcagcacactgtgtccgtcctttctgatgagtgtcttcgtgttttgagactccattatggccgacatgccggggggagggggaggggagcgcccaggtccccttgcacctggtctcccaggtaccaaattggaaacaaacacgcttcttcagggagtcaaaacccatgcttcccacttctgcccacccagagcggcccccatgcccaggctggggcaggcgccttgcagagaggggctttagcccccgaaagcaggcgaggtcccgggtccccgcccctgccacgcacacctgaagctgatctctgacctagggccttggggattcgagaccttccaaggagcaccaagaacctctcttcccctcccttccttcccctggagtttcgtccccagcccccgtccctaatccccccaagacaccccaacatgcctctccattgttccagagtgggcaggcggccgcagctggacccctggacggtggcacactgatgcaggccatgcacgctgccttggcggggcctggggcgggcaggcaccatggccgacggggggtggtgcatgctggctgagagagcgagcgtcctgccgccaagcggctggcccgggccacccctccagatccctgtcctggaatctcccttggtgcccaaggacagatgctctgttccctccattcatccacaagaagttcagggatgacctttaaagattctccccacccaaaaagtattaccccatcatcctattctcccatccaccttgatcttccctgcgtccctatccatcaatgctatttgtacctgccccgtgttgccacctcattcctttccttcctctgtgcacccctcctcacctaacctatatgtctcccctccttctcaatcaaagccggggacaaggttgtcccaccagcatctcagacaatgagcctctcctggcacctgtcgctctgtgcccctccctgccgcccccccccccccccccggttttcctcaagtcgcttctctcagtctctgcttagatgaatgtgtgcgcatgtgcaagagagggagggcgagcccttcctctcctggtctttgtgcaggaccaccatgggtccataagacaactttgtgcaaatttgaaaaaggcaccctttccacagaacatgcctgttggaaaattgttgcaatctaccaatgtggtgagaacaagacactttttttctatcacctgggaagctgttatatttaatatacaaatcgggggctgggcgtggtggctcatgcctgtaatcctagtgctttgggaggctgagacgggaggatcacttgagcccagttcgagactagcctgggcaacatagcgagaccccatctctacaaaaagaaaaaatattttaattaataaataagtacataaatctatcatttccaagatgggagccctttgtgcggtgtacaacctgcacaactgtgcacagtggcccagtctatgtgtgtttctctatttcccacctccttccccaccctacccccagtgtcccctccagtgtcctgctctggatttaccatacccctccccatcttcaactctgtgtttcctgcccacttgtgtctgaatccccacccaagttgccctcaccccccttctctgtgccacttcagcctgggctggtgcacaccagcccagcatcctctcccatgccaccaagcatggtggacagagcccctgcctgggacatggggaatcttttcttccctgggctggaagggagtgcccctcaccccttccccctgccattgcacagagagccaagatctggacatgcccctgagatacacttcccacggagctatgaatgagtctcgagattccgtctgcatgcgcccctgtctgtgctgttctgtgtcacagcctcgctgcatgcctgcgaggggcctgccccgtcagtggggggctgcctgcctgctgcttctcagaggaatgatgtggtctgtgcccatctgctctgtcctggtctgggccaagccagggattgggtgtggggagccagtggcaccccccaccagcggctgtggtcctggccccctcagccttggctgttgcatgcactgctcaaatccagcttgtgctctttttctttggggtcagactgaaacggggccatccagaagaactctggggcagggcgggggtggggcaagggttgaggcaaaccctggaaatgccagctctcaggtcaagcaggtgggggaaaaaaggagagggcaggggaccagaagtacaagagagccttttgtgccctccctgcgggccaccaagagaaactgagtactgggacaggtaacctaagtaagagacacctcagccgccacagctttcagagttcttcctgggactccctgggtaggggcgggcgcggctcacgggagacccaggagggatgcctgggaatgactgcgcttgccttgggttttctgtagcggcttctgcggatggacctgcccgtcgcagatgacaacaccgtccacttcaattccaccctcatggctctgatccgcacagccctggacatcaagattgccaagggtaaggaagggacaggggcgggcacagacaggcgtgacagggtggaaccggggatctccctccctaccccaaactagaggatctgctgtcaccacccggatcttcattcactcttccattcattcgttccacagggttttttggggtttggggttttggtgtttttttttttttttttttgagacagagtcttgctctgttgcccaggcagcagtgcggtgacatgatcgcaagtcactgcagccttgacctcccaggctcaagtgatccttccacctcagcctccccagtagctgggactacaggcacacaccaccatactcggctaatttttttttttttggtgtgacaatttccctctgtcacccaggctgaagtgcagtggtgtgatcttggctcattgctacctccgcctcccgggttcaagcgattctcctgcctcagcctcccaagtagctgggattataggtacccaccagcacacccggctaattttttatattttgggtagagatggggtttcaccatgttggccaggctggtctcgaactcctgacctctggtctcaaactcctgacctcaagtgatccacctgcctcgacctctcaaagtgctggattacaggcgtgagccaccatgcccaacctaattttttatattttttatagagatggggtttcatcaggttgcccaggctggtctcaaactcctgggctcaagcagtcctcccaccttggtctcccaaaatgctggtattacaggcatgagccaccacacccggcccatttggcagatatttagtgcactccttcaatgtgccagagacccgtccaagcaggggaggacccagcagcttacactttagatggatggggaggccgccactgaggaggtaaggcagtgtctcatggatccctggggggaaggtgctccaggcagaaggactggcaaaggccctgacagaggggtgaacacaggacacccggggcattgagctgactcaccttctgagtgagggcacgccacgcaggttcagagcagaggaggaacctgacccaactcacatttgaacaggttccctccggccactgaggggatgggagaccgaaaggaggccagtgtgggggctgctgatatcatctgggtggagacagggcggcagcttagatctaggggtaggctcgacgtggtggctcacgcctgtaatctcagcactttgggaggccaaggtgggtggattacttgaggtcaggatgaccagcctggccaatgtggtgaaacccccgtctctactaaaaatacaaaatttagccagacgtggtggtgggtactgtagtcccagctactagggaggatgaggcagaagaatcgcttgaacctgggaggcggaggttgcagtgagccgagatcacgccactgcactacagcctgggtgacagagcaagactctgtctcaaaaattaaattaaattaaattaactggacatggtggcatatgcctgtggtcccagctactcaggaggcagagatgagagtattgcttgaagccaggagtttgaggctgcagtgagtcatgatcgcaccactgcactccagcctgggcgacagaacgagatcctagctcaaaacaacagaaagaaaaagaaaaaaacattttttttaaagctgagaaggggctgggcgcagtggcttacgcctgtaatcccagcactttgggaggccaaggtgggtggatcacgaggtcaggagttcaagaccagcctggccaacatggtgaaaccccatctctaccaaaaatacaaaaagtagccgggtgtcatggtgggcgcctgtaaccccagctactccggaggctgaggcaggagaatcacttgaacctgggagacagaggttgcagtgagccaagatcgcgccactgaactccagcctggatgacagagcaagacgctgtctcaaaaaaaaaaaaagctgaggccgggcacgctggctcacgcctgtaatagcagcactttgggaggccgaggcgggcagatcatgaggtcaagaaatcgagaccatcctgggtaacacggtgaaaccccttctctactaaaaatacaaaaaattagctgggtgtggtggcacgcacctgtagtccctgctactcagaaggctgaggcaggagaattgcttgaacccgagaggcagaggttgcagcgagccgagcttgtgccactgcactccagcctgggtgacagagtgagacttcatctgaaaaaaaaaaaaaaaaaaagccgagaaggctggacatggtggctcacacctgtaatctcagcattttgttgaggccaggcacagtggttcacgcctgtaatctgagcacgctgggaggccgaggtgggtggatcatttgaggtcaggagttcgagatcagcctggccaacgtggcaaaaccctgtctctactaaaaatacaaaaattagccgggtgtcgtggcgtgtgcctgtaatcccagcactttgggaggctgaagcgggtggatcacttgaggtcaggagttcaagaccagcctggtcaacatggcaaaaccctgtctctactaaaaatacaaaaattagccaggtgtggtggcgggtacctgtaatcccagttactagggaggctgaggcagaagaatcacttgaacccgggaggcagagattgcagtgagccgagatcacatcactgcactttagcctgggcgacagagcaagactccatctcaaaaataaaaataaaaataaaaaataccgagaaattcccccaaagacctagctcagggctcactctccatcattagggggaaagaagaagaggaggccagggaggcgggcagagaccagggcagtgtgggctcctggaggcagcttctatgtttaaaagggcggcttcaggaggaaggggaccaaccgtgtcaggcactgcccagagaccaaggatgacaaggatcacaagtgactggtcatcatggtcactttgaccagtgcagctttggcggaggggtcaggggtcccctgtctggagtgcatttcggaggcccgaaaggggatgtgatgtgatttggcagctgattaaggacagcagggcagagagacaggcgcacaattgccagaagaaacggggacctgaggctcacgcctgtaatcccagcactttgggaggctgaggaaggtggatcacttgaggccaggaatttgagaccagcctggccaacatggcgaaaccccatctccactaaaaatacaaaaattagccaggcatggtggtgcacacctataatcccaacaacttgggaagctgagcacaagaattacttgaacctgggaggcagaggttgcagtgagccgagatcaaaccattgcactccagcctgggggacacagcaagactctgtctcaaaaaaaaaaaaaaaaagaaagaaagaaagaaaagaaaaaacaaatgggaccagaaaaaaggagtgggtgggagaggagcaggtggatagtcccacacatgggaaggtgctgagcccagctgaaaccactagtaagtcaggaggagggaagactgagcctcgagacatatgtgccttccagggtcttgagggaaagaagggaggaagagccaaggccacgtggcaagactcaaggaggaagtggcagggaaggtgggggactggaggggtggaggacagatattgttaatgccaggaacaaagtgaaggtaaagagagcacaaggaagttgggagcagtggctcacacctgtaatcccagcactttgggaagccaaggcaggaggatcacttgaggccaggagttcaagatcagcctggccaacacagagagaccccatctctacagaaaattttaaaattagccaggtgtggtgatgtgcacctgtagtcccaactacttgggaggctggagtgggaggatcactggggactgggatgtcaaggctgcagtgagctatatgatgaccacagacatagcagcttaagacacacctatttgtcagctcacagtcctgtaggtcagaagtccaaaaagctggactgggctgtctgctgagggtctcacgaggctgaaatcaaggtgtcagccaagctgggctcctctctggaggatctgggggagaatctacttccaggttcattcaggtgttggcagaattgaagtccttgtggctgtaggactgaggtcttgttttatcactggctttttagctttttgctcctggaagtgcatgtaatcctccatgtgctctcattctctctgacttccccatctgccacccagcagagacaatactgtgcttttcaagggctcacctgattggggcaggcctaccctgatcatctctgtattttgaggtcagctgacttgatattttttttttttcttgagacagaatttcactcttgttgccaaggctggagtataatagtgtgatctcagttcactgcaatctccgcctcccaggttcaagcaattctcctgcctcagcctcctgagtagctgagattacaggtgcccaccaccacgcccagctaaatttttttgtatttttagtagagatggggtttcacaaggttggccaggctggttttgaactcctgacctcaggtgatccacccgcctcagcctcccaaagtgctgggattacaggagtgagccaccatgcccagcattttctttctttttttttttttttttgaaacggagtcttgttctgtcacccaggctggagtgcagtggcgcaatctcggctcactgcaacctccatctcccgggttcaagtgattctgcctcagcctcccaagtaggtgggactacagatgcgtgccaccacgcccggataattttttgtatttttagtagaaacggggtttcaccatgatagcaggatggtctcgatctcccaacctcgtgatctgcccacctcggcctcccaaagtgctgggattacaggcgtgagccaccgcaccgggcctccggtattttaattatatctgcaaagtcccttcatagcctgggcaatggtccctagattagtgtttgaataaacagaatcttggcagaagggcagcttttgaattctgcctaccacagttccttcgtttgtacaacgggtctaacaacacccccactctttgtatgtaatgccatcgtaactcagcttctgtggcactctgagaatctgtgttcaggggtcccaaaaccacccacaggttcagtgattccctggaagaactcagaactgagaaaagtttttatactcacagtttattacagtgaaagaatatagattaaaatctgcaaagggccgggcacggtggctcacgcctgtaatcccagcactttgggagggcgaggtaggcagatcacttgaggtcacgagttcaagaccagcctgaccaacatggtgaaaccctgtctctactaaaaatacaaaaattagccaggcgtggtggctggcgccagtaatcccagctacttggaaggctaaggtaggagaatcacttgagcccaggaggcagaggttgcagtgagccgagatcccgccacttcactccaggctggacagagtgagactctattagaaaaaaaaaaaaaaaaaaaatctgcaaagggcctggcatggtggcttacgcctgtaatcctggcactttgggagggcaaggcgggcagatcacttgaggtcacaagtttgagaccagcctggccaacatggcgaaaccccgtctctaccaaaaatacaaaaattaggcatggtgccagacccctgtaatcccaactactcaggaggctgaggcaggagaatcgcttgaccctgggaggcagaggttgcagtgagctgagactgtgccattgcactccagcctgtgtgacaagatcaaaactctgtccaaaaagaaaattagccaggtgtggtggcatacacctgtagtcccagctactccagaggctgaggcacaagaatcctttcaacccaggagatagagctacattaagccaagatcacgccactgcactccagcctgggcaacagagcaagactctgtctcaaacaaacaaacaaattccaaaaacataaaatgcgcaaaggaagggcatctggggaagggtccaggagacaccaggtgcgagcttccagttgtctgcctccagtggagttgcacagacaacgcttaattctccctgcagtgtgtgacaacacgcaccgtgtactgccaaccagggaagctcacctgagccttggtgccccagggtttttattgagggtttgtcatataggcagggctgacgtagttactcagtctccagtccctccagaggtcaaactgataccacgtggcccaagaccccaacgataaatcgcattgttagaatgaactgtatggaaaattatccaggcgtggcggcgggcggctgtaatcccagctactggggaagctgaggcaggagaatcacttgaaactaggaggccgaggttgcagtgagccaagatcgcaccattgcactccagcctgggcaatagagcaaaaacaccatctcaaaataaataaataaatagaatgaactgtattggccgggtacagtgactcatgcctataatcccagcactttgggaggctgaggctggaggatcgtttgaggccaggagttcgagaccagcctaggcaacatagtgagaccctatctcttttttttaaaaaaaaaaaaaaaaaaaaaaaagaatgaactatacagtgtggcccaaggccccctgctaaataaagacactcttcaggcaggacatttcaaaggcttagagatcacctcccaggagcaagtcaatgggccagtcctttcatcggaatgtgcagggtttggacaacactagcctactgagctagtccttactgcttagcaccccagcttctatgacacctactggattcccttcctgagggtttcaaagactcctggagatgtctctgaatttggctgtcacagttgttacttgtaccccagatgccactcagttccctgaagacaatgatcccccagatttctcagccaggagcccctccacctcttgtcctcagtgggtgccaggcctcatcctggagttccacagctgagccaggctctcggggttacggaaggtcaagagggtgtggggacaacaatggaagagtgataacagtggcagccctttgagcagatgcgggtctcaggagaacataacgcgctttcttttcatagttcagctcactttctaagcacactgagcttcctttccagcaggctaaggggctgcaaagggggtacagattaacctcattcttcagattctcaaaaatggtgtcaccattcattgctggagactgggagaaagggggcaagtccatctcattctctctgtctctgtctctctctctctcttccctgtccatctgtttctctctcccacccacccctctgttctctctgcccagaagaatctctattttggttttggttttgtttgttttgtattgttttgagacggagtctcgttctgtcgcccaggctggagtgcagtggcgcagtctcaactcaccactgcagcctccacctcccaggttcaagcgattctcatgcctcagcctcccgagtagttgggattacaggcgcacgccaccacgcccagctaatttttgcatttttactagagactggtttcaccatgttgaccaggctggaccctatcctctttcaagccccccaccccaggcattgagggcagagccaactacctgcctgaaccaattagcatattaaacgtaaacccagttagcatatccaaatagcagcccacagtgacattctgactgtcagaatgtggattgcttgagcccaggagctcaaggcttcggtgaacaaagattgtgccacagcctgggcaacagagtaagtccctgtcgatcgatagatagatgatagatagatagatagatagatagatagatagatagatagatagatagataaatttttaaaaaaaataataggccaggcacagtggctcatgcctgtaatcccagcactttgggaggccgaggcaggcagatcacctgaggtcaggagttcgagaccagcctggccaacatggtgaaaccctgtctctacaaaaatataaaaatagccaggcagatgtctgtaatcccagctactcaggaggctgaggtaggagaatcgcttgaactctgaaggtggaggttgcagtgagccgagatcatgccattgcactccagcctgagtgacagagcgagactccatctcaaaaataataacaataataaaaataataataaatgctctggccccaaagtggcacattacatggtgcacaccccattagcaaggactcatcacatggccctgccaaccacaggaggaacccccccatgtactcaggtaggagggccaggaaacaccgtcagagagctttaatgactcaccccatgactggggtgagggacgagggactggctgcaggccaagggcatgtccgtggcagtggagacttgggaaaggggaaaagacctcctctgagccacgcacagtggctttcatctgtaattccagcactttgggaggctgaggtgggaggatcttgagcccaggaggtcgagactgcagtgagctatgtttgtgccacggcactctagcctgggcgacagagcaaaaccctgtctcaaaaatcaaaataaaaccaaaaccaaaacttcctctgttggggatgctccagggcgtcccagccttgaacagatgggtcactgcagtaataatcctatggcagacactgtcccaaggctgcacgcacgttactttgatcatcaaacaaccaggtgatagccaggcatggtggtgcgtgcctgtagtcccagctactcaggaagctgaagcgggagaatctcttgaacctgggaggcggaggtaacagtgagtcgagatcacatgactgcacttcagcctgggaacagagagagactctgtcaaaaaaaaaaaaaaaacaggccagacgcggtggctcacgcatgtaatcgccagcactttgggaggctgaggagggtggatcacctgaggtcaggagtttgagaccagcctggccaacatggtgaaaccccgtctctactaaaaatacaaaattagttgggcgtggtggtgcacacctgtaatcccagctactcgggaggctgaggcaggagaatcgcttgaacccaggaggcagaggttgcagtgagctgagattgcaccattgcactccagcctgggcaacaagagtgaaactccatctcaaaaaaaaaacaaaaaaaaaacaaccagccaggcgcggtggcttacgcctgtaatcccagcactttgggaggccgaggcgtgtggatcacccgaggttaggagttcgagaccagcttgaccaacatggtgaaactccgtctctactaaaaatacaaaaaattagccaggcatggtggtgcatgtctgtaatcccagctactcgggaagctgagacaggagaattgcttgaacccaggagtcggaggttgcagtgagccaagctcgtgccactgcactccagcctgggcaacagagcaagactctgtctaaaaaaaaaaaaaaaacacacacacacacacacaacaaccaggtgaggcaagtactcttgctatcatctccatttcacagatggagaaactgagttactaagtggtagagtaacctaagtcatgcagccgataactgggagacaagattgggacccaggtcgcccagctgttctccatgccgggctgtctcctgcacagctgctccatggtcctggccccaccgaaaaccagagcccacaaggtcattccagcagcactgcccagggcctcctctgggccaggccgttggggaactggagaccccatggggaccagaaagattggggtctcgttctcgggagcctatggctttgcagctgacccagagtccagctgacacccaggcaggcagtcagggtctgtctacacccccattgcaggaggagccgacaaacagcagatggacgctgagctgcggaaggagatgatggcgatttggcccaatctgtcccagaagacgctagacctgctggtcacacctcacaagtgtaagagctgagcccagccctgggatccaatccaccaggacagatggagggggagggaaaggggaggcctggggagagtgttggcctgggctggtatacacagggacccaggacaagggccccaaagaggcctgcccttggtgagctcaccgtgtgtgtgcccccagccacggacctcaccgtggggaagatctacgcagccatgatgatcatggagtactaccggcagagcaaggccaagaagctgcaggccatgcgcgaggagcaggtgcgctgttcgccgctctggggacatctgggctggggacagtggcttgcatgtcaccacgggaaccaactggaatatgagggtggctgagccccagggcaggtccctgaaaagtaggggctgtgcacagcagctcacacctgcaatctcagtgctttgagaggccagggcagagggatcgtttgagaccaggatgagaccaccctgggcaacacagtgagactccatctctacaaaataaaacattagccaggcatggtggtgcacacctgtagtcccagctatttaggaggccaagatgggaggatcacttgaggccaggagtgggagaccagtctgggcaacatagaaagacccatatctctacaaaaaaaaaataaaattagctgcatgtggcgccatgcacctgtggtcccagctacttgggaggctgaggcaggagaatcacttgaacctgggaggtggaggttgcagcaagccaagatcaagccactgcactccagcccgggtgataagagcaggactctatctcaaaaaaaaaaaaaaaaaaaaaaaaaaaagttcttgccaaggacacatcatgtggattcattcttcattcagctgctccaccaacacttattgagtattactgtgtgcagggcgctgttctcagtcctcggggatgcacccatggggaaaataggccagaatccctgccctcagggagcagacattccaagtggggaaatgccaatggtagcaaatgactgaatcgtgcaacatccagcaaagagaaagaaagtgtcgtgggggaaagtggagaagaatccagaagataggagtatccaggggaggaggggatgcggtgggaaatgggtagttggggagcctccctgagaaagtgacatgtgagcaaaggcttgaaggaaaaggggagagggagtgagctaagcaatacctggaagggtgttccaggcagaggaaacagccagtgcaaaggctctgaggctggaccgtgcctgggttgtttgggtaacagcaaagaggccagtgtggtggaaaagagcagggaggagacaagggcaaggaggtgacagggcagatccttcagggccatgggagctgcaggaaggactctggctttttccccaagcaagtgggagccatggagggttctaagcaaaggagggataggacctgactcaagtgctcatgggcgccctctggtggctcttgtggaacagtggggttgaaggtaggagcgggagacctgggagaaggtgcctgcagtgagagatgaggacgtgggaccaggctggggctatgacttgggtggaggagtgagaagtggtccagttctgcgtggaattggaagggtctagatggatgagacctgagagagtgtgtgtgtgtgtgtgtgtgtatactggggatgtcgcaatgccttctgggtaccaccgtcccaccaccccacccttgtccacacactgctctctgccccattccccaggaccggacacccctcatgttccagcgcatggagcccccgtccccaacgcaggaagggggacctggccagaacgccctcccctccacccagctggacccaggaggagccctgtgagtgtcacccctgccagggaggtggagtgtgggggtgccgtggtccccacgttctggaagctgcccaagcgcccactgctaccccggcctctgtcccccatgcaggatggctcacgaaagcggcctcaaggagagcccgtcctgggtgacccagcgtgcccaggagatgttccagaagacgggcacatggagtccggaacaaggcccccctaccgacatgcccaacagccagcctaactctcaggtgcctctgtcccccaactccccaatggctcccagggcccgggtggttcaggtggaagggatctgggccccccacacacacacacctgcagctccctccctctgcagacaccagggatctggaggtcaggccccagagctcatctggctttgccatctgctccgcagtccgtggagatgcgagagatgggcagagatggctactccgacagcgagcactacctccccatggaaggccagggccgggctgcctccatgccccgcctccctgcagagaaccaggtgagggctttcaccactgccctggggctggacccctcactctgcactgggtagggccaggcccccccacaagcagcccagtgcatcccctccctgccggactcaggcctgggtagggactccttcagtctctgaagcagtctgcaggccccacccaccacctggtcacacctggagcacctgcagaccctcctccctcacagaggacagagaggaaagtgctccccctggggcagagggcagtggccactgcaaaatggtctctggctgccctggttggaggctgcagacaggggaggttgtggaagatttgtgggtgcagcagggttcaacagggccagctgagacctgccacgaagatcacccctacacaaacacacacacacatgctcaacatacatgcacacacatgtgcagctgtgcgcctactcagatgcttgcatacacacacgtgtgtgcacgtgggcatatacacactgcacatgtactcacacatgcacacatgtacgtgcacacgtgtctgcatatgggaacttggcaggtcctaggatacagtagcagagtctggggtgggtctgggggcagctgggctcgtattttctgtctggtctctgtgggagtcattggggggcacaggggtgtgtgcttgatgtgtgtctgtgtgtggccgcttcacccagctgccaggcccacctgcaggtgatcccgttgccttggactcatgggacagagggcccagaggcatagctggctgcccacccggcctgaacagcgggggcccatgcacgcagcccgcctctggaggagaacagggcatggctgtgagagcctggcccgggtgcgtggcatgtgtggctgtggcgagctttccgtgtgccgtgtgtggcgtctgcacggggcaggaggctgtgctgtgcctggctggaccagggtcacctgagggcctggcctctggctgctgggaacgtgggttggggagcacccagcgtgcatgctgctgctccctcaggaccgagctgctgggccccaggagagggttgggacaagcccagctgacggccaccacatggaagctttgagcatcggccggagccaggggttggggtgtgcatcgcatgaggcagagcccagggccaggggctcgaggctgcgccgtcctgtctttcggtcccatgcctctgccatttgtctgtctgcatctcctgtctgtctcctctgtacccatgggaatagaggacgcccagccccgggggcctgggacacccacccgccaggactttaacttttcttttcctccctgccttctccctccgatttctcttgatgccagtgccactcccctccttggcttcttctccatgcaccacctcctcactctccctcttgccttttatatttattttcttctttctgttttttctgtgtgcaccatcccatggggctgtgacagaggagaaggggccggccacgtgggaataacctcagtgtatgtaccgcgcctgcccagcgcccagcagggctccggccccctcttcctccccaccccccctccagggagtcccgtcatctctcaccgtccccggaccccaccctttctttggcaatcgcaccctctcccctccatggagcccaatccttgtgtgtggtgtcctgtgtgtgcccctcacccataagccctggtgggcggggccatccccatcctcacccctacccccttttcttcagggccccccacgccggaggacactggctctccaagagcctggcccactctgcacctctttctggggggcttcttctcctgacaccaccaccaacccctggtcctgcagctcctacctggagcagggccaccagcgctcagctgggctggaccctgggaggcgggcgtctgccccatctccctccttccctcctctgcctgctgcagagaaacctgtgtgtcagggcttgacccagggatgaagcaccagggaaaagagtgggcccccagagcctccagtgcctgggtatcccccacccccacccagagctccctagcttgggcctcaccagaaggactcagacttgtgggggcagcgagcacagccccgttagccgggaggacccaaagctgccatgccgggcacctggtcctgagcccataggtcagccagccacagtcggaggcttctcaccctcccaggagagcaagctggggcagggatgagtgcggcagtccagggctcccaggtttgcaccctggatgtggagagggcttccctctggccagcctgagcctgcccaactgtggctgggcccccaggactggagagtgaggatcagatctttctggtcagaacccaggatgggctcaaaaggagcagtcctgtctctgagggacagaggaatcctcaggctccaccctcagaggcctggccacacccagagccctgattgatcagggggagccaaggccccatggcatcccctggcccctgccccaggatggtcacaccgcagtcaccgaaggccaccaccaggctgccacaatggggcaggaaggaccgggaccacttggtgctagctgctgaccccagcccaccggcctgtcccctcccccagaccatctcagacaccagccccatgaagcgttcagcctccgtgctgggccccaaggcccgacgcctggacgattactcgctggagcgggtcccgcccgaggagaaccagcggcaccaccagcggcgccgcgaccgcagccaccgcgcctctgagcgctccctgggccgctacaccgatgtggacacaggtgggcagccctgtggtgctcagggacaagcagaacagaggagaggagaggggaggagaaggcagggcggaggagacactaaggaagaagaaagggagaggcctccatggagaggggacagagggggccaggcagcagctgcaggaacctgggtactaccccctccccccaacccactgacctgcctcggttcaggggatctctagggcccccacaccttccaggtggcctcctgtgtgtgcatctgccccacctctccctcacgaccacctgtgtgtctgtctgaccctcacccggcccaggcttggggacagacctgagcatgaccacccaatccggggacctgccgtcgaaggagcgggaccaggagcggggccggcccaaggatcggaagcatcgacagcaccaccaccaccaccaccaccaccaccatcccccgccccccgacaaggaccgctatgcccaggaacggccggaccacggccgggcacgggctcgggaccagcgctggtcccgctcgcccagcgagggccgagagcacatggcgcaccggcaggtgggtgcggctgcaagtgaccccaggctgggctcggccgggaggcggggaggagagaaggggataccccatccaacagccactctaggcaaaggtccccggatcccggctgtgaccacctcccatcctgcccccaagccaccggggtgcccggcggccggagcggacacggatccccaccacaccagctgcctatgctgtccccccagcccccttgcccacccgccgccccctccccgccgcccgcagctgcttgctcctcggttgtggatcatatttgagttctgggccgtgccgcccgacctttcactttcctttaacccggcttctgtttttgtttcaattatgatttctgtcctctggacgcctgtgagtaatttttgaaacttctgctatttttaaccccgaaacttacaaaactccatttctcatttctcttttcactttgttgtgttggttttcgactcctcccctccctgtctcactccccctcctcccctccctcctccctgtggctgttgcttttttccattcaatgtcctgtgtcccccctctcctcctcctcctcctcctccccctccccctcctccctctcctcccggcccctctcccttcgctcccctctcttcctcccaatcccgtgtctcctttgattttgttgtatctttttttttgatttcctttgtttcaattttcgtgtagggcagtagttccgtaagtggaagcccagccccctcaacatctggtaccagcactccgcggcggggccgccgccagctcccccagaccccctccaccccccggccacacgtgtcctattcccctgtgatccgtaaggccggcggctcggggcccccgcagcagcagcagcagcagcagcagcagcagcagcagcaggcggtggccaggccgggccgggcggccaccagcggccctcggaggtacccaggccccacggccgagcctctggccggagatcggccgcccacggggggccacagcagcggccgctcgcccaggatggagaggcgggtcccaggcccggcccggagcgagtcccccagggcctgtcgacacggcggggcccggtggccggcatctggcccgcacgtgtccgaggggcccccgggtccccggcaccatggctactaccggggctccgactacgacgaggccgatggcccgggcagcgggggcggcgaggaggccatggccggggcctacgacgcgccaccccccgtacgacacgcgtcctcgggcgccaccgggcgctcgcccaggactccccgggcctcgggcccggcctgcgcctcgccttctcggcacggccggcgactccccaacggctactacccggcgcacggactggccaggccccgcgggccgggctccaggaagggcctgcacgaaccctacagcgagagtgacgatgattggtgctaagcccgggcgaggtggcgcccgcccggccccccacgcaccccacgcacacaccccacccgaggagccgcgcagaggccgcgggggcccagcacagagggcccgggagagggccagccgggagaccccagactctggagaggccagggctgggccacaagggtgtcccgcagagaccctcggccaaaagagaccctcctgggcagccacggcgccccccaaccagccccgatccccccacccacgacaggggctctcgggtgggaggcagggagcagacaaaccacacagccaagggatttgaattaactcagccatttttggagaactttggggaacatgaaaaaaaaaaaaaaaaaaaaaaaaaaaaacatttttaaaagaaaaaacggggagaaaaaaatagcttctattgatgagttttatcatctcaattgaatctttcctttccctgatgaagacagctggtggccgagtgcggcaaagaagccagaaggaaccagaatcccagtgccctacacccaccaccagacacactcacacccacacacgttctcagacacacacaagagtgcttgccggttataccaaaccctactattactgcctgcagaaatcaatttaaaaaaataataataacaataaacaattttaaaaaggacaaaaaaattaatgattgagaaaagaggcatttttttctgacatttggtcctgcttgaaacaacaaaagaagaagaaaaacccaccatcaccaccgattcctttgcttcttttttccttttttcctaccttgtttgaaaaccgtgggcttgggactgtgaattattgcatgacattcaaaaagaaaaaaaaaataaaaaaaagttgaatcaaa

SEQ ID NO: 2 - protein, 2506 aa, Homo sapiens
  ref <308>: DATABASE ACCESSION NUMBER: NCBI / NP_001120694.1
  ref <309>: DATABASE ENTRY DATE: 2013-09-14
  ref <313>: RELEVANT RESIDUES IN SEQ ID NO: (1)..(2506)
MARFGDEMPARYGGGGSGAAAGVVVGSGGGRGAGGSRQGGQPGAQRMYKQSMAQRARTMALYNPIPVRQNCLTVNRSLFLFSEDNVVRKYAKKITEWPPFEYMILATIIANCIVLALEQHLPDDDKTPMSERLDDTEPYFIGIFCFEAGIKIIALGFAFHKGSYLRNGWNVMDFVVVLTGILATVGTEFDLRTLRAVRVLRPLKLVSGIPSLQVVLKSIMKAMIPLLQIGLLLFFAILIFAIIGLEFYMGKFHTTCFEEGTDDIQGESPAPCGTEEPARTCPNGTKCQPYWEGPNNGITQFDNILFAVLTVFQCITMEGWTDLLYNSNDASGNTWNWLYFIPLIIIGSFFMLNLVLGVLSGEFAKERERVENRRAFLKLRRQQQIERELNGYMEWISKAEEVILAEDETDGEQRHPFDALRRTTIKKSKTDLLNPEEAEDQLADIASVGSPFARASIKSAKLENSTFFHKKERRMRFYIRRMVKTQAFYWTVLSLVALNTLCVAIVHYNQPEWLSDFLYYAEFIFLGLFMSEMFIKMYGLGTRPYFHSSFNCFDCGVIIGSIFEVIWAVIKPGTSFGISVLRALRLLRIFKVTKYWASLRNLVVSLLNSMKSIISLLFLLFLFIVVFALLGMQLFGGQFNFDEGTPPTNFDTFPAAIMTVFQILTGEDWNEVMYDGIKSQGGVQGGMVFSIYFIVLTLFGNYTLLNVFLAIAVDNLANAQELTKDEQEEEEAANQKLALQKAKEVAEVSPLSAANMSIAVKEQQKNQKPAKSVWEQRTSEMRKQNLLASREALYNEMDPDERWKAAYTRHLRPDMKTHLDRPLVVDPQENRNNNTNKSRAAEPTVDQRLGQQRAEDFLRKQARYHDRARDPSGSAGLDARRPWAGSQEAELSREGPYGRESDHHAREGSLEQPGFWEGEAERGKAGDPHRRHVHRQGGSRESRSGSPRTGADGEHRRHRAHRRPGEEGPEDKAERRARHREGSRPARGGEGEGEGPDGGERRRRHRHGAPATYEGDARREDKERRHRRRKENQGSGVPVSGPNLSTTRPIQQDLGRQDPPLAEDIDNMKNNKLATAESAAPHGSLGHAGLPQSPAKMGNSTDPGPMLAIPAMATNPQNAASRRTPNNPGNPSNPGPPKTPENSLIVTNPSGTQTNSAKTARKPDHTTVDIPPACPPPLNHTVVQVNKNANPDPLPKKEEEKKEEEEDDRGEDGPKPMPPYSSMFILSTTNPLRRLCHYILNLRYFEMCILMVIAMSSIALAAEDPVQPNAPRNNVLRYFDYVFTGVFTFEMVIKMIDLGLVLHQGAYFRDLWNILDFIVVSGALVAFAFTGNSKGKDINTIKSLRVLRVLRPLKTIKRLPKLKAVFDCVVNSLKNVFNILIVYMLFMFIFAVVAVQLFKGKFFHCTDESKEFEKDCRGKYLLYEKNEVKARDREWKKYEFHYDNVLWALLTLFTVSTGEGWPQVLKHSVDATFENQGPSPGYRMEMSIFYVVYFVVFPFFFVNIFVALIIITFQEQGDKMMEEYSLEKNERACIDFAISAKPLTRHMPQNKQSFQYRMWQFVVSPPFEYTIMAMIALNTIVLMMKFYGASVAYENALRVFNIVFTSLFSLECVLKVMAFGILNYFRDAWNIFDFVTVLGSITDILVTEFGNNFINLSFLRLFRAARLIKLLRQGYTIRILLWTFVQSFKALPYVCLLIAMLFFIYAIIGMQVFGNIGIDVEDEDSDEDEFQITEHNNFRTFFQALMLLFRSATGEAWHNIMLSCLSGKPCDKNSGILTRECGNEFAYFYFVSFIFLCSFLMLNLFVAVIMDNFEYLTRDSSILGPHHLDEYVRVWAEYDPAAWGRMPYLDMYQMLRHMSPPLGLGKKCPARVAYKRLLRMDLPVADDNTVHFNSTLMALIRTALDIKIAKGGADKQQMDAELRKEMMAIWPNLSQKTLDLLVTPHKSTDLTVGKIYAAMMIMEYYRQSKAKKLQAMREEQDRTPLMFQRMEPPSPTQEGGPGQNALPSTQLDPGGALMAHESGLKESPSWVTQRAQEMFQKTGTWSPEQGPPTDMPNSQPNSQSVEMREMGRDGYSDSEHYLPMEGQGRAASMPRLPAENQRRRGRPRGNNLSTISDTSPMKRSASVLGPKARRLDDYSLERVPPEENQRHHQRRRDRSHRASERSLGRYTDVDTGLGTDLSMTTQSGDLPSKERDQERGRPKDRKHRQHHHHHHHHHHPPPPDKDRYAQERPDHGRARARDQRWSRSPSEGREHMAHRQGSSSVSGSPAPSTSGTSTPRRGRRQLPQTPSTPRPHVSYSPVIRKAGGSGPPQQQQQQQQQQQQQAVARPGRAATSGPRRYPGPTAEPLAGDRPPTGGHSSGRSPRMERRVPGPARSESPRACRHGGARWPASGPHVSEGPPGPRHHGYYRGSDYDEADGPGSGGGEEAMAGAYDAPPPVRHASSGATGRSPRTPRASGPACASPSRHGRRLPNGYYPAHGLARPRGPGSRKGLHEPYSESDDDWC

SEQ ID NO: 3 - protein, 547 aa, Homo sapiens
  ref <308>: DATABASE ACCESSION NUMBER: NCBI / NP_001120694.1
  ref <309>: DATABASE ENTRY DATE: 2013-09-14
  ref <313>: RELEVANT RESIDUES IN SEQ ID NO: (1960)..(2506)
MIMEYYRQSKAKKLQAMREEQDRTPLMFQRMEPPSPTQEGGPGQNALPSTQLDPGGALMAHESGLKESPSWVTQRAQEMFQKTGTWSPEQGPPTDMPNSQPNSQSVEMREMGRDGYSDSEHYLPMEGQGRAASMPRLPAENQRRRGRPRGNNLSTISDTSPMKRSASVLGPKARRLDDYSLERVPPEENQRHHQRRRDRSHRASERSLGRYTDVDTGLGTDLSMTTQSGDLPSKERDQERGRPKDRKHRQHHHHHHHHHHPPPPDKDRYAQERPDHGRARARDQRWSRSPSEGREHMAHRQGSSSVSGSPAPSTSGTSTPRRGRRQLPQTPSTPRPHVSYSPVIRKAGGSGPPQQQQQQQQQQQQQAVARPGRAATSGPRRYPGPTAEPLAGDRPPTGGHSSGRSPRMERRVPGPARSESPRACRHGGARWPASGPHVSEGPPGPRHHGYYRGSDYDEADGPGSGGGEEAMAGAYDAPPPVRHASSGATGRSPRTPRASGPACASPSRHGRRLPNGYYPAHGLARPRGPGSRKGLHEPYSESDDDWC

SEQ ID NO: 4 - DNA, 8628 bp, Homo sapiens
  ref <308>: DATABASE ACCESSION NUMBER: NCBI / NM_001127222
  ref <309>: DATABASE ENTRY DATE: 2013-09-14
  ref <313>: RELEVANT RESIDUES IN SEQ ID NO: (1)..(8628)
gatgtcccgagctgctatccccggctcggcccgggcagccgccttctgagcccccgacccgaggcgccgagccgccgccgcccgatgggctgggccgtggagcgtctccgcagtcgtagctccagccgccgcgctcccagccccggcagcctcagcatcagcggcggcggcggcggcggcggcgtcttccgcatcgttcgccgcagcgtaacccggagccctttgctctttgcagaatggcccgcttcggagacgagatgccggcccgctacgggggaggaggctccggggcagccgccggggtggtcgtgggcagcggaggcgggcgaggagccgggggcagccggcagggcgggcagcccggggcgcaaaggatgtacaagcagtcaatggcgcagagagcgcggaccatggcactctacaaccccatccccgtccgacagaactgcctcacggttaaccggtctctcttcctcttcagcgaagacaacgtggtgagaaaatacgccaaaaagatcaccgaatggcctccctttgaatatatgattttagccaccatcatagcgaattgcatcgtcctcgcactggagcagcatctgcctgatgatgacaagaccccgatgtctgaacggctggatgacacagaaccatacttcattggaattttttgtttcgaggctggaattaaaatcattgcccttgggtttgccttccacaaaggctcctacttgaggaatggctggaatgtcatggactttgtggtggtgctaacgggcatcttggcgacagttgggacggagtttgacctacggacgctgagggcagttcgagtgctgcggccgctcaagctggtgtctggaatcccaagtttacaagtcgtcctgaagtcgatcatgaaggcgatgatccctttgctgcagatcggcctcctcctattttttgcaatccttatttttgcaatcatagggttagaattttatatgggaaaatttcataccacctgctttgaagaggggacagatgacattcagggtgagtctccggctccatgtgggacagaagagcccgcccgcacctgccccaatgggaccaaatgtcagccctactgggaagggcccaacaacgggatcactcagttcgacaacatcctgtttgcagtgctgactgttttccagtgcataaccatggaagggtggactgatctcctctacaatagcaacgatgcctcagggaacacttggaactggttgtacttcatccccctcatcatcatcggctccttttttatgctgaaccttgtgctgggtgtgctgtcaggggagtttgccaaagaaagggaacgggtggagaaccggcgggcttttctgaagctgaggcggcaacaacagattgaacgtgagctcaatgggtacatggagtggatctcaaaagcagaagaggtgatcctcgccgaggatgaaactgacggggagcagaggcatccctttgatgctctgcggagaaccaccataaagaaaagcaagacagatttgctcaaccccgaagaggctgaggatcagctggctgatatagcctctgtgggttctcccttcgcccgagccagcattaaaagtgccaagctggagaactcgaccttttttcacaaaaaggagaggaggatgcgtttctacatccgccgcatggtcaaaactcaggccttctactggactgtactcagtttggtagctctcaacacgctgtgtgttgctattgttcactacaaccagcccgagtggctctccgacttcctttactatgcagaattcattttcttaggactctttatgtccgaaatgtttataaaaatgtacgggcttgggacgcggccttacttccactcttccttcaactgctttgactgtggggttatcattgggagcatcttcgaggtcatctgggctgtcataaaacctggcacatcctttggaatcagcgtgttacgagccctcaggttattgcgtattttcaaagtcacaaagtactgggcatctctcagaaacctggtcgtctctctcctcaactccatgaagtccatcatcagcctgttgtttctccttttcctgttcattgtcgtcttcgcccttttgggaatgcaactcttcggcggccagtttaatttcgatgaagggactcctcccaccaacttcgatacttttccagcagcaataatgacggtgtttcagatcctgacgggcgaagactggaacgaggtcatgtacgacgggatcaagtctcaggggggcgtgcagggcggcatggtgttctccatctatttcattgtactgacgctctttgggaactacaccctcctgaatgtgttcttggccatcgctgtggacaatctggccaacgcccaggagctcaccaaggacgagcaagaggaagaagaagcagcgaaccagaaacttgccctacagaaagccaaggaggtggcagaagtgagtcctctgtccgcggccaacatgtctatagctgtgaaagagcaacagaagaatcaaaagccagccaagtccgtgtgggagcagcggaccagtgagatgcgaaagcagaacttgctggccagccgggaggccctgtataacgaaatggacccggacgagcgctggaaggctgcctacacgcggcacctgcggccagacatgaagacgcacttggaccggccgctggtggtggacccgcaggagaaccgcaacaacaacaccaacaagagccgggcggccgagcccaccgtggaccagcgcctcggccagcagcgcgccgaggacttcctcaggaaacaggcccgctaccacgatcgggcccgggaccccagcggctcggcgggcctggacgcacggaggccctgggcgggaagccaggaggccgagctgagccgggagggaccctacggccgcgagtcggaccaccacgcccgggagggcagcctggagcaacccgggttctgggagggcgaggccgagcgaggcaaggccggggacccccaccggaggcacgtgcaccggcaggggggcagcagggagagccgcagcgggtccccgcgcacgggcgcggacggggagcatcgacgtcatcgcgcgcaccgcaggcccggggaggagggtccggaggacaaggcggagcggagggcgcggcaccgcgagggcagccggccggcccggggcggcgagggcgagggcgagggccccgacgggggcgagcgcaggagaaggcaccggcatggcgctccagccacgtacgagggggacgcgcggagggaggacaaggagcggaggcatcggaggaggaaagagaaccagggctccggggtccctgtgtcgggccccaacctgtcaaccacccggccaatccagcaggacctgggccgccaagacccacccctggcagaggatattgacaacatgaagaacaacaagctggccaccgcggagtcggccgctccccacggcagccttggccacgccggcctgccccagagcccagccaagatgggaaacagcaccgaccccggccccatgctggccatccctgccatggccaccaacccccagaacgccgccagccgccggacgcccaacaacccggggaacccatccaatcccggcccccccaagacccccgagaatagccttatcgtcaccaaccccagcggcacccagaccaattcagctaagactgccaggaaacccgaccacaccacagtggacatccccccagcctgcccaccccccctcaaccacaccgtcgtacaagtgaacaaaaacgccaacccagacccactgccaaaaaaagaggaagagaagaaggaggaggaggaagacgaccgtggggaagacggccctaagccaatgcctccctatagctccatgttcatcctgtccacgaccaacccccttcgccgcctgtgccattacatcctgaacctgcgctactttgagatgtgcatcctcatggtcattgccatgagcagcatcgccctggccgccgaggaccctgtgcagcccaacgcacctcggaacaacgtgctgcgatactttgactacgtttttacaggcgtctttacctttgagatggtgatcaagatgattgacctggggctcgtcctgcatcagggtgcctacttccgtgacctctggaatattctcgacttcatagtggtcagtggggccctggtagcctttgccttcactggcaatagcaaaggaaaagacatcaacacgattaaatccctccgagtcctccgggtgctacgacctcttaaaaccatcaagcggctgccaaagctcaaggctgtgtttgactgtgtggtgaactcacttaaaaacgtcttcaacatcctcatcgtctacatgctattcatgttcatcttcgccgtggtggctgtgcagctcttcaaggggaaattcttccactgcactgacgagtccaaagagtttgagaaagattgtcgaggcaaatacctcctctacgagaagaatgaggtgaaggcgcgagaccgggagtggaagaagtatgaattccattacgacaatgtgctgtgggctctgctgaccctcttcaccgtgtccacgggagaaggctggccacaggtcctcaagcattcggtggacgccacctttgagaaccagggccccagccccgggtaccgcatggagatgtccattttctacgtcgtctactttgtggtgttccccttcttctttgtcaatatctttgtggccttgatcatcatcaccttccaggagcaaggggacaagatgatggaggaatacagcctggagaaaaatgagagggcctgcattgatttcgccatcagcgccaagccgctgacccgacacatgccgcagaacaagcagagcttccagtaccgcatgtggcagttcgtggtgtctccgcctttcgagtacacgatcatggccatgatcgccctcaacaccatcgtgcttatgatgaagttctatggggcttctgttgcttatgaaaatgccctgcgggtgttcaacatcgtcttcacctccctcttctctctggaatgtgtgctgaaagtcatggcttttgggattctgaattatttccgcgatgcctggaacatcttcgactttgtgactgttctgggcagcatcaccgatatcctcgtgactgagtttgggaataacttcatcaacctgagctttctccgcctcttccgagctgcccggctcatcaaacttctccgtcagggttacaccatccgcattcttctctggacctttgtgcagtccttcaaggccctgccttatgtctgtctgctgatcgccatgctcttcttcatctatgccatcattgggatgcaggtgtttggtaacattggcatcgacgtggaggacgaggacagtgatgaagatgagttccaaatcactgagcacaataacttccggaccttcttccaggccctcatgcttctcttccggagtgccaccggggaagcttggcacaacatcatgctttcctgcctcagcgggaaaccgtgtgataagaactctggcatcctgactcgagagtgtggcaatgaatttgcttatttttactttgtttccttcatcttcctctgctcgtttctgatgctgaatctctttgtcgccgtcatcatggacaactttgagtacctcacccgagactcctccatcctgggcccccaccacctggatgagtacgtgcgtgtctgggccgagtatgaccccgcagcttggggccgcatgccttacctggacatgtatcagatgctgagacacatgtctccgcccctgggtctggggaagaagtgtccggccagagtggcttacaagcggcttctgcggatggacctgcccgtcgcagatgacaacaccgtccacttcaattccaccctcatggctctgatccgcacagccctggacatcaagattgccaagggaggagccgacaaacagcagatggacgctgagctgcggaaggagatgatggcgatttggcccaatctgtcccagaagacgctagacctgctggtcacacctcacaagtccacggacctcaccgtggggaagatctacgcagccatgatgatcatggagtactaccggcagagcaaggccaagaagctgcaggccatgcgcgaggagcaggaccggacacccctcatgttccagcgcatggagcccccgtccccaacgcaggaagggggacctggccagaacgccctcccctccacccagctggacccaggaggagccctgatggctcacgaaagcggcctcaaggagagcccgtcctgggtgacccagcgtgcccaggagatgttccagaagacgggcacatggagtccggaacaaggcccccctaccgacatgcccaacagccagcctaactctcagtccgtggagatgcgagagatgggcagagatggctactccgacagcgagcactacctccccatggaaggccagggccgggctgcctccatgccccgcctccctgcagagaaccagaggagaaggggccggccacgtgggaataacctcagtaccatctcagacaccagccccatgaagcgttcagcctccgtgctgggccccaaggcccgacgcctggacgattactcgctggagcgggtcccgcccgaggagaaccagcggcaccaccagcggcgccgcgaccgcagccaccgcgcctctgagcgctccctgggccgctacaccgatgtggacacaggcttggggacagacctgagcatgaccacccaatccggggacctgccgtcgaaggagcgggaccaggagcggggccggcccaaggatcggaagcatcgacagcaccaccaccaccaccaccaccaccaccatcccccgccccccgacaaggaccgctatgcccaggaacggccggaccacggccgggcacgggctcgggaccagcgctggtcccgctcgcccagcgagggccgagagcacatggcgcaccggcagggcagtagttccgtaagtggaagcccagccccctcaacatctggtaccagcactccgcggcggggccgccgccagctcccccagaccccctccaccccccggccacacgtgtcctattcccctgtgatccgtaaggccggcggctcggggcccccgcagcagcagcagcagcagcagcagcagcagcagcagcaggcggtggccaggccgggccgggcggccaccagcggccctcggaggtacccaggccccacggccgagcctctggccggagatcggccgcccacggggggccacagcagcggccgctcgcccaggatggagaggcgggtcccaggcccggcccggagcgagtcccccagggcctgtcgacacggcggggcccggtggccggcatctggcccgcacgtgtccgaggggcccccgggtccccggcaccatggctactaccggggctccgactacgacgaggccgatggcccgggcagcgggggcggcgaggaggccatggccggggcctacgacgcgccaccccccgtacgacacgcgtcctcgggcgccaccgggcgctcgcccaggactccccgggcctcgggcccggcctgcgcctcgccttctcggcacggccggcgactccccaacggctactacccggcgcacggactggccaggccccgcgggccgggctccaggaagggcctgcacgaaccctacagcgagagtgacgatgattggtgctaagcccgggcgaggtggcgcccgcccggccccccacgcaccccacgcacacaccccacccgaggagccgcgcagaggccgcgggggcccagcacagagggcccgggagagggccagccgggagaccccagactctggagaggccagggctgggccacaagggtgtcccgcagagaccctcggccaaaagagaccctcctgggcagccacggcgccccccaaccagccccgatccccccacccacgacaggggctctcgggtgggaggcagggagcagacaaaccacacagccaagggatttgaattaactcagccatttttggagaactttggggaacatgaaaaaaaaaaaaaaaaaaaaaaaaaaaaacatttttaaaagaaaaaacggggagaaaaaaatagcttctattgatgagttttatcatctcaattgaatctttcctttccctgatgaagacagctggtggccgagtgcggcaaagaagccagaaggaaccagaatcccagtgccctacacccaccaccagacacactcacacccacacacgttctcagacacacacaagagtgcttgccggttataccaaaccctactattactgcctgcagaaatcaatttaaaaaaataataataacaataaacaattttaaaaaggacaaaaaaattaatgattgagaaaagaggcatttttttctgacatttggtcctgcttgaaacaacaaaagaagaagaaaaacccaccatcaccaccgattcctttgcttcttttttccttttttcctaccttgtttgaaaaccgtgggcttgggactgtgaattattgcatgacattcaaaaagaaaaaaaaaataaaaaaaagttgaatcaaa

SEQ ID NO: 5 - DNA, 1010 bp, Homo sapiens
  ref <308>: DATABASE ACCESSION NUMBER: NCBI / NM_001127222.1
  ref <309>: DATABASE ENTRY DATE: 2013-09-14
  ref <313>: RELEVANT RESIDUES IN SEQ ID NO: (5101)..(6110)
tgaattatttccgcgatgcctggaacatcttcgactttgtgactgttctgggcagcatcaccgatatcctcgtgactgagtttgggaataacttcatcaacctgagctttctccgcctcttccgagctgcccggctcatcaaacttctccgtcagggttacaccatccgcattcttctctggacctttgtgcagtccttcaaggccctgccttatgtctgtctgctgatcgccatgctcttcttcatctatgccatcattgggatgcaggtgtttggtaacattggcatcgacgtggaggacgaggacagtgatgaagatgagttccaaatcactgagcacaataacttccggaccttcttccaggccctcatgcttctcttccggagtgccaccggggaagcttggcacaacatcatgctttcctgcctcagcgggaaaccgtgtgataagaactctggcatcctgactcgagagtgtggcaatgaatttgcttatttttactttgtttccttcatcttcctctgctcgtttctgatgctgaatctctttgtcgccgtcatcatggacaactttgagtacctcacccgagactcctccatcctgggcccccaccacctggatgagtacgtgcgtgtctgggccgagtatgaccccgcagcttggggccgcatgccttacctggacatgtatcagatgctgagacacatgtctccgcccctgggtctggggaagaagtgtccggccagagtggcttacaagcggcttctgcggatggacctgcccgtcgcagatgacaacaccgtccacttcaattccaccctcatggctctgatccgcacagccctggacatcaagattgccaagggaggagccgacaaacagcagatggacgctgagctgcggaaggagatgatggcgatttggcccaatctgtcccagaagacgctagacctgctggtcacacctcacaagtccacggacctcaccgtggggaagatctacgcagcc

SEQ ID NO: 6 - DNA, 78 bp, Homo sapiens
tcacacctcacaagtccacggacctcaccgtggggaagatctacgcagccatgatgatcatggagtactaccggcaga

SEQ ID NO: 7 - DNA, 25 bp, Homo sapiens
acggacctcaccgtggggaagatct

SEQ ID NO: 8 - DNA, 25 bp, Homo sapiens
agatcttccccacggtgaggtccgt

SEQ ID NO: 9 - DNA, 1010 bp, Homo sapiens
ggctgcgtagatcttccccacggtgaggtccgtggacttgtgaggtgtgaccagcaggtctagcgtcttctgggacagattgggccaaatcgccatcatctccttccgcagctcagcgtccatctgctgtttgtcggctcctcccttggcaatcttgatgtccagggctgtgcggatcagagccatgagggtggaattgaagtggacggtgttgtcatctgcgacgggcaggtccatccgcagaagccgcttgtaagccactctggccggacacttcttccccagacccaggggcggagacatgtgtctcagcatctgatacatgtccaggtaaggcatgcggccccaagctgcggggtcatactcggcccagacacgcacgtactcatccaggtggtgggggcccaggatggaggagtctcgggtgaggtactcaaagttgtccatgatgacggcgacaaagagattcagcatcagaaacgagcagaggaagatgaaggaaacaaagtaaaaataagcaaattcattgccacactctcgagtcaggatgccagagttcttatcacacggtttcccgctgaggcaggaaagcatgatgttgtgccaagcttccccggtggcactccggaagagaagcatgagggcctggaagaaggtccggaagttattgtgctcagtgatttggaactcatcttcatcactgtcctcgtcctccacgtcgatgccaatgttaccaaacacctgcatcccaatgatggcatagatgaagaagagcatggcgatcagcagacagacataaggcagggccttgaaggactgcacaaaggtccagagaagaatgcggatggtgtaaccctgacggagaagtttgatgagccgggcagctcggaagaggcggagaaagctcaggttgatgaagttattcccaaactcagtcacgaggatatcggtgatgctgcccagaacagtcacaaagtcgaagatgttccaggcatcgcggaaataattca

SEQ ID NO: 10 - DNA, 78 bp, Homo sapiens
tctgccggtagtactccatgatcatcatggctgcgtagatcttccccacggtgaggtccgtggacttgtgaggtgtga

SEQ ID NO: 11 - DNA, 25 bp, Homo sapiens
agatcttccccacggtgaggtccgt

SEQ ID NO: 12 - DNA, 1644 bp, Homo sapiens
atgatcatggagtactaccggcagagcaaggccaagaagctgcaggccatgcgcgaggagcaggaccggacacccctcatgttccagcgcatggagcccccgtccccaacgcaggaagggggacctggccagaacgccctcccctccacccagctggacccaggaggagccctgatggctcacgaaagcggcctcaaggagagcccgtcctgggtgacccagcgtgcccaggagatgttccagaagacgggcacatggagtccggaacaaggcccccctaccgacatgcccaacagccagcctaactctcagtccgtggagatgcgagagatgggcagagatggctactccgacagcgagcactacctccccatggaaggccagggccgggctgcctccatgccccgcctccctgcagagaaccagaggagaaggggccggccacgtgggaataacctcagtaccatctcagacaccagccccatgaagcgttcagcctccgtgctgggccccaaggcccgacgcctggacgattactcgctggagcgggtcccgcccgaggagaaccagcggcaccaccagcggcgccgcgaccgcagccaccgcgcctctgagcgctccctgggccgctacaccgatgtggacacaggcttggggacagacctgagcatgaccacccaatccggggacctgccgtcgaaggagcgggaccaggagcggggccggcccaaggatcggaagcatcgacagcaccaccaccaccaccaccaccaccaccatcccccgccccccgacaaggaccgctatgcccaggaacggccggaccacggccgggcacgggctcgggaccagcgctggtcccgctcgcccagcgagggccgagagcacatggcgcaccggcagggcagtagttccgtaagtggaagcccagccccctcaacatctggtaccagcactccgcggcggggccgccgccagctcccccagaccccctccaccccccggccacacgtgtcctattcccctgtgatccgtaaggccggcggctcggggcccccgcagcagcagcagcagcagcagcagcagcagcagcagcaggcggtggccaggccgggccgggcggccaccagcggccctcggaggtacccaggccccacggccgagcctctggccggagatcggccgcccacggggggccacagcagcggccgctcgcccaggatggagaggcgggtcccaggcccggcccggagcgagtcccccagggcctgtcgacacggcggggcccggtggccggcatctggcccgcacgtgtccgaggggcccccgggtccccggcaccatggctactaccggggctccgactacgacgaggccgatggcccgggcagcgggggcggcgaggaggccatggccggggcctacgacgcgccaccccccgtacgacacgcgtcctcgggcgccaccgggcgctcgcccaggactccccgggcctcgggcccggcctgcgcctcgccttctcggcacggccggcgactccccaacggctactacccggcgcacggactggccaggccccgcgggccgggctccaggaagggcctgcacgaaccctacagcgagagtgacgatgattggtgctaa

SEQ ID NO: 13 - DNA, 28 bp, Artificial Sequence
  Synthetic primer
atacccatggtggctgcgtagatcttcc

SEQ ID NO: 14 - DNA, 28 bp, Artificial Sequence
  Synthetic Primer
aatgaattcctcatggctctgatccgca

SEQ ID NO: 15 - DNA, 29 bp, Artificial Sequence
  Synthetic primer
aatgaattctccaggccctcatgcttctc

SEQ ID NO: 16 - DNA, 29 bp, Artificial Sequence
  Synthetic primer
aatgaattctgaattatttccgcgatgcc

SEQ ID NO: 17 - DNA, 28 bp, Artificial Sequence
  Synthetic primer
atacaagctttggctgcgtagatcttcc

SEQ ID NO: 18 - DNA, 28 bp, Artificial Sequence
  Synthetic primer
aatacgcgtctcatggctctgatccgca

SEQ ID NO: 19 - DNA, 29 bp, Artificial Sequence
  Synthetic primer
aatacgcgttccaggccctcatgcttctc

SEQ ID NO: 20 - DNA, 29 bp, Artificial Sequence
  Synthetic primer
aatacgcgttgaattatttccgcgatgcc

SEQ ID NO: 21 - DNA, 28 bp, Artificial Sequence
  Synthetic primer
cgtatctagagatatagtctatggatgg

SEQ ID NO: 22 - DNA, 29 bp, Artificial Sequence
  Synthetic primer
gtaggccggcctctatcttgtgccagatc

SEQ ID NO: 23 - DNA, 29 bp, Artificial Sequence
  Synthetic primer
ataggccggcctggctggtgctaaccaca

SEQ ID NO: 24 - DNA, 30 bp, Artificial Sequence
  Synthetic primer
cgctggccggccccaagataagaaacaatt

SEQ ID NO: 25 - DNA, 44 bp, Artificial Sequence
  Synthetic primer
cgtatctagagatatagtctatggatggatcatctggatagatt

SEQ ID NO: 26 - DNA, 44 bp, Artificial Sequence
  Synthetic primer
cgtatctagagatatagtctatggatggatcatcgcctaatgga

SEQ ID NO: 27 - DNA, 44 bp, Artificial Sequence
  Synthetic primer
cgtatctagagatatagtctatggatggatcatcttacgctgga

SEQ ID NO: 28 - DNA, 19 bp, Artificial Sequence
  Synthetic primer
ctggccaacatggtgaaac

SEQ ID NO: 29 - DNA, 18 bp, Artificial Sequence
  Synthetic primer
ccgggttcaagcgattct

SEQ ID NO: 30 - DNA, 19 bp, Artificial Sequence
  Synthetic primer
ccgggttcaagcgattctc

SEQ ID NO: 31 - DNA, 32 bp, Artificial Sequence
  Synthetic primer
ataaggatccagccaccatgcagaagacgcta

SEQ ID NO: 32 - DNA, 100 bp, Artificial Sequence
  Synthetic primer
gtatctagattacttgtcatcgtcatccttgtagtcgatgtcatgatctttataatcaccgtcatggtctttgtagtcgcaccaatcatcgtcagtctcg

SEQ ID NO: 33 - DNA, 41 bp, Artificial Sequence
  Synthetic primer
aattgctagcgatgttccagaagacgggcacatggagtccg

SEQ ID NO: 34 - DNA, 64 bp, Artificial Sequence
  Synthetic primer
aattatcgatctattagtgatggtgatggtgatggcaccaatcatcgtcactctcgctgtaggg

SEQ ID NO: 35 - DNA, 20 bp, Artificial Sequence
  Synthetic primer
tgacagtgccatagtttgga

SEQ ID NO: 36 - DNA, 24 bp, Artificial Sequence
  Synthetic primer
aagtgtaaatagtgcaaattcccc

SEQ ID NO: 37 - DNA, 20 bp, Artificial Sequence
  Synthetic primer
aagaccatcatggccaacat

SEQ ID NO: 38 - DNA, 19 bp, Artificial Sequence
  Synthetic primer
ttggctcaacacaacctcc

SEQ ID NO: 39 - DNA, 21 bp, Artificial Sequence
  Synthetic primer
tctagccctccttgcctggaa

SEQ ID NO: 40 - DNA, 21 bp, Artificial Sequence
  Synthetic primer
tggaggttgaatttggaaatt

SEQ ID NO: 41 - DNA, 22 bp, Artificial Sequence
  Synthetic primer
gtgtccttcatctccaagttcc

SEQ ID NO: 42 - DNA, 22 bp, Artificial Sequence
  Synthetic primer
gaagcctgaacaactcctgact

SEQ ID NO: 43 - DNA, 21 bp, Artificial Sequence
  Synthetic primer
atgccccaggcctcttgctgt

SEQ ID NO: 44 - DNA, 21 bp, Artificial Sequence
  Synthetic primer
gggtagctcacagcaggtaga

SEQ ID NO: 45 - DNA, 21 bp, Artificial Sequence
  Synthetic primer
tggcatcatatttaccctgct

SEQ ID NO: 46 - DNA, 22 bp, Artificial Sequence
  Synthetic primer
tttcttcttgtcatctgcatcg

SEQ ID NO: 47 - DNA, 21 bp, Artificial Sequence
  Synthetic primer
gattggactgagcagtcagga

SEQ ID NO: 48 - DNA, 21 bp, Artificial Sequence
  Synthetic primer
tcttaacctgatacagtcatc

SEQ ID NO: 49 - DNA, 17 bp, Artificial Sequence
  Synthetic primer
acttccagctgctgccc

SEQ ID NO: 50 - DNA, 18 bp, Artificial Sequence
  Synthetic primer
atacagcaggtggcggag

SEQ ID NO: 51 - DNA, 20 bp, Artificial Sequence
  Synthetic primer
ctactgtgggaagctcaggc

SEQ ID NO: 52 - DNA, 20 bp, Artificial Sequence
  Synthetic primer
gggaaccaccttctctcctc

SEQ ID NO: 53 - DNA, 20 bp, Artificial Sequence
  Synthetic primer
cccaggaccagtgaagaaag

SEQ ID NO: 54 - DNA, 20 bp, Artificial Sequence
  Synthetic primer
aaagaggaaggggcaatgat

SEQ ID NO: 55 - DNA, 21 bp, Artificial Sequence
  Synthetic primer
gccggtagtactccatgatca

SEQ ID NO: 56 - DNA, 28 bp, Artificial Sequence
  Synthetic primer
atgatgatcatggagtactaccggcaga

SEQ ID NO: 57 - DNA, 21 bp, Artificial Sequence
  Synthetic primer
tgatcatggagtactaccggc

SEQ ID NO: 58 - DNA, 28 bp, Artificial Sequence
  Synthetic primer
tctgccggtagtactccatgatcatcat

SEQ ID NO: 59 - DNA, 21 bp, Artificial Sequence
  Synthetic primer
gccggtagtactccatgatca

SEQ ID NO: 60 - protein, 2266 aa, Homo sapiens
  ref <308>: DATABASE ACCESSION NUMBER: NCBI / NP_000059
  ref <309>: DATABASE ENTRY DATE: 2014-05-24
  ref <313>: RELEVANT RESIDUES IN SEQ ID NO: (1)..(2266)
MARFGDEMPARYGGGGSGAAAGVVVGSGGGRGAGGSRQGGQPGAQRMYKQSMAQRARTMALYNPIPVRQNCLTVNRSLFLFSEDNVVRKYAKKITEWPPFEYMILATIIANCIVLALEQHLPDDDKTPMSERLDDTEPYFIGIFCFEAGIKIIALGFAFHKGSYLRNGWNVMDFVVVLTGILATVGTEFDLRTLRAVRVLRPLKLVSGIPSLQVVLKSIMKAMIPLLQIGLLLFFAILIFAIIGLEFYMGKFHTTCFEEGTDDIQGESPAPCGTEEPARTCPNGTKCQPYWEGPNNGITQFDNILFAVLTVFQCITMEGWTDLLYNSNDASGNTWNWLYFIPLIIIGSFFMLNLVLGVLSGEFAKERERVENRRAFLKLRRQQQIERELNGYMEWISKAEEVILAEDETDGEQRHPFDGALRRTTIKKSKTDLLNPEEAEDQLADIASVGSPFARASIKSAKLENSTFFHKKERRMRFYIRRMVKTQAFYWTVLSLVALNTLCVAIVHYNQPEWLSDFLYYAEFIFLGLFMSEMFIKMYGLGTRPYFHSSFNCFDCGVIIGSIFEVIWAVIKPGTSFGISVLRALRLLRIFKVTKYWASLRNLVVSLLNSMKSIISLLFLLFLFIVVFALLGMQLFGGQFNFDEGTPPTNFDTFPAAIMTVFQILTGEDWNEVMYDGIKSQGGVQGGMVFSIYFIVLTLFGNYTLLNVFLAIAVDNLANAQELTKVEADEQEEEEAANQKLALQKAKEVAEVSPLSAANMSIAVKEQQKNQKPAKSVWEQRTSEMRKQNLLASREALYNEMDPDERWKAAYTRHLRPDMKTHLDRPLVVDPQENRNNNTNKSRAAEPTVDQRLGQQRAEDFLRKQARYHDRARDPSGSAGLDARRPWAGSQEAELSREGPYGRESDHHAREGSLEQPGFWEGEAERGKAGDPHRRHVHRQGGSRESRSGSPRTGADGEHRRHRAHRRPGEEGPEDKAERRARHREGSRPARGGEGEGEGPDGGERRRRHRHGAPATYEGDARREDKERRHRRRKENQGSGVPVSGPNLSTTRPIQQDLGRQDPPLAEDIDNMKNNKLATAESAAPHGSLGHAGLPQSPAKMGNSTDPGPMLAIPAMATNPQNAASRRTPNNPGNPSNPGPPKTPENSLIVTNPSGTQTNSAKTARKPDHTTVDIPPACPPPLNHTVVQVNKNANPDPLPKKEEEKKEEEEDDRGEDGPKPMPPYSSMFILSTTNPLRRLCHYILNLRYFEMCILMVIAMSSIALAAEDPVQPNAPRNNVLRYFDYVFTGVFTFEMVIKMIDLGLVLHQGAYFRDLWNILDFIVVSGALVAFAFTGNSKGKDINTIKSLRVLRVLRPLKTIKRLPKLKAVFDCVVNSLKNVFNILIVYMLFMFIFAVVAVQLFKGKFFHCTDESKEFEKDCRGKYLLYEKNEVKARDREWKKYEFHYDNVLWALLTLFTVSTGEGWPQVLKHSVDATFENQGPSPGYRMEMSIFYVVYFVVFPFFFVNIFVALIIITFQEQGDKMMEEYSLEKNERACIDFAISAKPLTRHMPQNKQSFQYRMWQFVVSPPFEYTIMAMIALNTIVLMMKFYGASVAYENALRVFNIVFTSLFSLECVLKVMAFGILNYFRDAWNIFDFVTVLGSITDILVTEFGNPNNFINLSFLRLFRAARLIKLLRQGYTIRILLWTFVQSFKALPYVCLLIAMLFFIYAIIGMQVFGNIGIDVEDEDSDEDEFQITEHNNFRTFFQALMLLFRSATGEAWHNIMLSCLSGKPCDKNSGILTRECGNEFAYFYFVSFIFLCSFLMLNLFVAVIMDNFEYLTRDSSILGPHHLDEYVRVWAEYDPAAWGRMPYLDMYQMLRHMSPPLGLGKKCPARVAYKRLLRMDLPVADDNTVHFNSTLMALIRTALDIKIAKGGADKQQMDAELRKEMMAIWPNLSQKTLDLLVTPHKSTDLTVGKIYAAMMIMEYYRQSKAKKLQAMREEQDRTPLMFQRMEPPSPTQEGGPGQNALPSTQLDPGGALMAHESGLKESPSWVTQRAQEMFQKTGTWSPEQGPPTDMPNSQPNSQSVEMREMGRDGYSDSEHYLPMEGQGRAASMPRLPAENQRRRGRPRGNNLSTISDTSPMKRSASVLGPKARRLDDYSLERVPPEENQRHHQRRRDRSHRASERSLGRYTDVDTGLGTDLSMTTQSGDLPSKERDQERGRPKDRKHRQHHHHHHHHHHPPPPDKDRYAQERPDHGRARARDQRWSRSPSEGREHMAHRQ

SEQ ID NO: 61 - protein, 2512 aa, Homo sapiens
  ref <308>: DATABASE ACCESSION NUMBER: NCBI / NP_075461.2
  ref <309>: DATABASE ENTRY DATE: 2014-05-24
  ref <313>: RELEVANT RESIDUES IN SEQ ID NO: (1)..(2512)
MARFGDEMPARYGGGGSGAAAGVVVGSGGGRGAGGSRQGGQPGAQRMYKQSMAQRARTMALYNPIPVRQNCLTVNRSLFLFSEDNVVRKYAKKITEWPPFEYMILATIIANCIVLALEQHLPDDDKTPMSERLDDTEPYFIGIFCFEAGIKIIALGFAFHKGSYLRNGWNVMDFVVVLTGILATVGTEFDLRTLRAVRVLRPLKLVSGIPSLQVVLKSIMKAMIPLLQIGLLLFFAILIFAIIGLEFYMGKFHTTCFEEGTDDIQGESPAPCGTEEPARTCPNGTKCQPYWEGPNNGITQFDNILFAVLTVFQCITMEGWTDLLYNSNDASGNTWNWLYFIPLIIIGSFFMLNLVLGVLSGEFAKERERVENRRAFLKLRRQQQIERELNGYMEWISKAEEVILAEDETDGEQRHPFDGALRRTTIKKSKTDLLNPEEAEDQLADIASVGSPFARASIKSAKLENSTFFHKKERRMRFYIRRMVKTQAFYWTVLSLVALNTLCVAIVHYNQPEWLSDFLYYAEFIFLGLFMSEMFIKMYGLGTRPYFHSSFNCFDCGVIIGSIFEVIWAVIKPGTSFGISVLRALRLLRIFKVTKYWASLRNLVVSLLNSMKSIISLLFLLFLFIVVFALLGMQLFGGQFNFDEGTPPTNFDTFPAAIMTVFQILTGEDWNEVMYDGIKSQGGVQGGMVFSIYFIVLTLFGNYTLLNVFLAIAVDNLANAQELTKVEADEQEEEEAANQKLALQKAKEVAEVSPLSAANMSIAVKEQQKNQKPAKSVWEQRTSEMRKQNLLASREALYNEMDPDERWKAAYTRHLRPDMKTHLDRPLVVDPQENRNNNTNKSRAAEPTVDQRLGQQRAEDFLRKQARYHDRARDPSGSAGLDARRPWAGSQEAELSREGPYGRESDHHAREGSLEQPGFWEGEAERGKAGDPHRRHVHRQGGSRESRSGSPRTGADGEHRRHRAHRRPGEEGPEDKAERRARHREGSRPARGGEGEGEGPDGGERRRRHRHGAPATYEGDARREDKERRHRRRKENQGSGVPVSGPNLSTTRPIQQDLGRQDPPLAEDIDNMKNNKLATAESAAPHGSLGHAGLPQSPAKMGNSTDPGPMLAIPAMATNPQNAASRRTPNNPGNPSNPGPPKTPENSLIVTNPSGTQTNSAKTARKPDHTTVDIPPACPPPLNHTVVQVNKNANPDPLPKKEEEKKEEEEDDRGEDGPKPMPPYSSMFILSTTNPLRRLCHYILNLRYFEMCILMVIAMSSIALAAEDPVQPNAPRNNVLRYFDYVFTGVFTFEMVIKMIDLGLVLHQGAYFRDLWNILDFIVVSGALVAFAFTGNSKGKDINTIKSLRVLRVLRPLKTIKRLPKLKAVFDCVVNSLKNVFNILIVYMLFMFIFAVVAVQLFKGKFFHCTDESKEFEKDCRGKYLLYEKNEVKARDREWKKYEFHYDNVLWALLTLFTVSTGEGWPQVLKHSVDATFENQGPSPGYRMEMSIFYVVYFVVFPFFFVNIFVALIIITFQEQGDKMMEEYSLEKNERACIDFAISAKPLTRHMPQNKQSFQYRMWQFVVSPPFEYTIMAMIALNTIVLMMKFYGASVAYENALRVFNIVFTSLFSLECVLKVMAFGILNYFRDAWNIFDFVTVLGSITDILVTEFGNPNNFINLSFLRLFRAARLIKLLRQGYTIRILLWTFVQSFKALPYVCLLIAMLFFIYAIIGMQVFGNIGIDVEDEDSDEDEFQITEHNNFRTFFQALMLLFRSATGEAWHNIMLSCLSGKPCDKNSGILTRECGNEFAYFYFVSFIFLCSFLMLNLFVAVIMDNFEYLTRDSSILGPHHLDEYVRVWAEYDPAAWGRMPYLDMYQMLRHMSPPLGLGKKCPARVAYKRLLRMDLPVADDNTVHFNSTLMALIRTALDIKIAKGGADKQQMDAELRKEMMAIWPNLSQKTLDLLVTPHKSTDLTVGKIYAAMMIMEYYRQSKAKKLQAMREEQDRTPLMFQRMEPPSPTQEGGPGQNALPSTQLDPGGALMAHESGLKESPSWVTQRAQEMFQKTGTWSPEQGPPTDMPNSQPNSQSVEMREMGRDGYSDSEHYLPMEGQGRAASMPRLPAENQRRRGRPRGNNLSTISDTSPMKRSASVLGPKARRLDDYSLERVPPEENQRHHQRRRDRSHRASERSLGRYTDVDTGLGTDLSMTTQSGDLPSKERDQERGRPKDRKHRQHHHHHHHHHHPPPPDKDRYAQERPDHGRARARDQRWSRSPSEGREHMAHRQGSSSVSGSPAPSTSGTSTPRRGRRQLPQTPSTPRPHVSYSPVIRKAGGSGPPQQQQQQQQQQQQQAVARPGRAATSGPRRYPGPTAEPLAGDRPPTGGHSSGRSPRMERRVPGPARSESPRACRHGGARWPASGPHVSEGPPGPRHHGYYRGSDYDEADGPGSGGGEEAMAGAYDAPPPVRHASSGATGRSPRTPRASGPACASPSRHGRRLPNGYYPAHGLARPRGPGSRKGLHEPYSESDDDWC

SEQ ID NO: 62 - protein, 2261 aa, Homo sapiens
  ref <308>: DATABASE ACCESSION NUMBER: NCBI / NP_001120693.1
  ref <309>: DATABASE ENTRY DATE: 2014-05-25
  ref <313>: RELEVANT RESIDUES IN SEQ ID NO: (1)..(2261)
MARFGDEMPARYGGGGSGAAAGVVVGSGGGRGAGGSRQGGQPGAQRMYKQSMAQRARTMALYNPIPVRQNCLTVNRSLFLFSEDNVVRKYAKKITEWPPFEYMILATIIANCIVLALEQHLPDDDKTPMSERLDDTEPYFIGIFCFEAGIKIIALGFAFHKGSYLRNGWNVMDFVVVLTGILATVGTEFDLRTLRAVRVLRPLKLVSGIPSLQVVLKSIMKAMIPLLQIGLLLFFAILIFAIIGLEFYMGKFHTTCFEEGTDDIQGESPAPCGTEEPARTCPNGTKCQPYWEGPNNGITQFDNILFAVLTVFQCITMEGWTDLLYNSNDASGNTWNWLYFIPLIIIGSFFMLNLVLGVLSGEFAKERERVENRRAFLKLRRQQQIERELNGYMEWISKAEEVILAEDETDGEQRHPFDGALRRTTIKKSKTDLLNPEEAEDQLADIASVGSPFARASIKSAKLENSTFFHKKERRMRFYIRRMVKTQAFYWTVLSLVALNTLCVAIVHYNQPEWLSDFLYYAEFIFLGLFMSEMFIKMYGLGTRPYFHSSFNCFDCGVIIGSIFEVIWAVIKPGTSFGISVLRALRLLRIFKVTKYWASLRNLVVSLLNSMKSIISLLFLLFLFIVVFALLGMQLFGGQFNFDEGTPPTNFDTFPAAIMTVFQILTGEDWNEVMYDGIKSQGGVQGGMVFSIYFIVLTLFGNYTLLNVFLAIAVDNLANAQELTKDEQEEEEAANQKLALQKAKEVAEVSPLSAANMSIAVKEQQKNQKPAKSVWEQRTSEMRKQNLLASREALYNEMDPDERWKAAYTRHLRPDMKTHLDRPLVVDPQENRNNNTNKSRAAEPTVDQRLGQQRAEDFLRKQARYHDRARDPSGSAGLDARRPWAGSQEAELSREGPYGRESDHHAREGSLEQPGFWEGEAERGKAGDPHRRHVHRQGGSRESRSGSPRTGADGEHRRHRAHRRPGEEGPEDKAERRARHREGSRPARGGEGEGEGPDGGERRRRHRHGAPATYEGDARREDKERRHRRRKENQGSGVPVSGPNLSTTRPIQQDLGRQDPPLAEDIDNMKNNKLATAESAAPHGSLGHAGLPQSPAKMGNSTDPGPMLAIPAMATNPQNAASRRTPNNPGNPSNPGPPKTPENSLIVTNPSGTQTNSAKTARKPDHTTVDIPPACPPPLNHTVVQVNKNANPDPLPKKEEEKKEEEEDDRGEDGPKPMPPYSSMFILSTTNPLRRLCHYILNLRYFEMCILMVIAMSSIALAAEDPVQPNAPRNNVLRYFDYVFTGVFTFEMVIKMIDLGLVLHQGAYFRDLWNILDFIVVSGALVAFAFTGNSKGKDINTIKSLRVLRVLRPLKTIKRLPKLKAVFDCVVNSLKNVFNILIVYMLFMFIFAVVAVQLFKGKFFHCTDESKEFEKDCRGKYLLYEKNEVKARDREWKKYEFHYDNVLWALLTLFTVSTGEGWPQVLKHSVDATFENQGPSPGYRMEMSIFYVVYFVVFPFFFVNIFVALIIITFQEQGDKMMEEYSLEKNERACIDFAISAKPLTRHMPQNKQSFQYRMWQFVVSPPFEYTIMAMIALNTIVLMMKFYGASVAYENALRVFNIVFTSLFSLECVLKVMAFGILNYFRDAWNIFDFVTVLGSITDILVTEFGNNFINLSFLRLFRAARLIKLLRQGYTIRILLWTFVQSFKALPYVCLLIAMLFFIYAIIGMQVFGNIGIDVEDEDSDEDEFQITEHNNFRTFFQALMLLFRSATGEAWHNIMLSCLSGKPCDKNSGILTRECGNEFAYFYFVSFIFLCSFLMLNLFVAVIMDNFEYLTRDSSILGPHHLDEYVRVWAEYDPAACGRIHYKDMYSLLRVISPPLGLGKKCPHRVACKRLLRMDLPVADDNTVHFNSTLMALIRTALDIKIAKGGADKQQMDAELRKEMMAIWPNLSQKTLDLLVTPHKSTDLTVGKIYAAMMIMEYYRQSKAKKLQAMREEQDRTPLMFQRMEPPSPTQEGGPGQNALPSTQLDPGGALMAHESGLKESPSWVTQRAQEMFQKTGTWSPEQGPPTDMPNSQPNSQSVEMREMGRDGYSDSEHYLPMEGQGRAASMPRLPAENQRRRGRPRGNNLSTISDTSPMKRSASVLGPKARRLDDYSLERVPPEENQRHHQRRRDRSHRASERSLGRYTDVDTGLGTDLSMTTQSGDLPSKERDQERGRPKDRKHRQHHHHHHHHHHPPPPDKDRYAQERPDHGRARARDQRWSRSPSEGREHMAHRQ

SEQ ID NO: 63 - protein, 2263 aa, Homo sapiens
  ref <308>: DATABASE ACCESSION NUMBER: NCBI / NP_001167551.1
  ref <309>: DATABASE ENTRY DATE: 2014-05-05
  ref <313>: RELEVANT RESIDUES IN SEQ ID NO: (1)..(2263)
MARFGDEMPARYGGGGSGAAAGVVVGSGGGRGAGGSRQGGQPGAQRMYKQSMAQRARTMALYNPIPVRQNCLTVNRSLFLFSEDNVVRKYAKKITEWPPFEYMILATIIANCIVLALEQHLPDDDKTPMSERLDDTEPYFIGIFCFEAGIKIIALGFAFHKGSYLRNGWNVMDFVVVLTGILATVGTEFDLRTLRAVRVLRPLKLVSGIPSLQVVLKSIMKAMIPLLQIGLLLFFAILIFAIIGLEFYMGKFHTTCFEEGTDDIQGESPAPCGTEEPARTCPNGTKCQPYWEGPNNGITQFDNILFAVLTVFQCITMEGWTDLLYNSNDASGNTWNWLYFIPLIIIGSFFMLNLVLGVLSGEFAKERERVENRRAFLKLRRQQQIERELNGYMEWISKAEEVILAEDETDGEQRHPFDGALRRTTIKKSKTDLLNPEEAEDQLADIASVGSPFARASIKSAKLENSTFFHKKERRMRFYIRRMVKTQAFYWTVLSLVALNTLCVAIVHYNQPEWLSDFLYYAEFIFLGLFMSEMFIKMYGLGTRPYFHSSFNCFDCGVIIGSIFEVIWAVIKPGTSFGISVLRALRLLRIFKVTKYWASLRNLVVSLLNSMKSIISLLFLLFLFIVVFALLGMQLFGGQFNFDEGTPPTNFDTFPAAIMTVFQILTGEDWNEVMYDGIKSQGGVQGGMVFSIYFIVLTLFGNYTLLNVFLAIAVDNLANAQELTKDEQEEEEAANQKLALQKAKEVAEVSPLSAANMSIAVKEQQKNQKPAKSVWEQRTSEMRKQNLLASREALYNEMDPDERWKAAYTRHLRPDMKTHLDRPLVVDPQENRNNNTNKSRAAEPTVDQRLGQQRAEDFLRKQARYHDRARDPSGSAGLDARRPWAGSQEAELSREGPYGRESDHHAREGSLEQPGFWEGEAERGKAGDPHRRHVHRQGGSRESRSGSPRTGADGEHRRHRAHRRPGEEGPEDKAERRARHREGSRPARGGEGEGEGPDGGERRRRHRHGAPATYEGDARREDKERRHRRRKENQGSGVPVSGPNLSTTRPIQQDLGRQDPPLAEDIDNMKNNKLATAESAAPHGSLGHAGLPQSPAKMGNSTDPGPMLAIPAMATNPQNAASRRTPNNPGNPSNPGPPKTPENSLIVTNPSGTQTNSAKTARKPDHTTVDIPPACPPPLNHTVVQVNKNANPDPLPKKEEEKKEEEEDDRGEDGPKPMPPYSSMFILSTTNPLRRLCHYILNLRYFEMCILMVIAMSSIALAAEDPVQPNAPRNNVLRYFDYVFTGVFTFEMVIKMIDLGLVLHQGAYFRDLWNILDFIVVSGALVAFAFTGNSKGKDINTIKSLRVLRVLRPLKTIKRLPKLKAVFDCVVNSLKNVFNILIVYMLFMFIFAVVAVQLFKGKFFHCTDESKEFEKDCRGKYLLYEKNEVKARDREWKKYEFHYDNVLWALLTLFTVSTGEGWPQVLKHSVDATFENQGPSPGYRMEMSIFYVVYFVVFPFFFVNIFVALIIITFQEQGDKMMEEYSLEKNERACIDFAISAKPLTRHMPQNKQSFQYRMWQFVVSPPFEYTIMAMIALNTIVLMMKFYGASVAYENALRVFNIVFTSLFSLECVLKVMAFGILNYFRDAWNIFDFVTVLGSITDILVTEFGNPNNFINLSFLRLFRAARLIKLLRQGYTIRILLWTFVQSFKALPYVCLLIAMLFFIYAIIGMQVFGNIGIDVEDEDSDEDEFQITEHNNFRTFFQALMLLFRSATGEAWHNIMLSCLSGKPCDKNSGILTRECGNEFAYFYFVSFIFLCSFLMLNLFVAVIMDNFEYLTRDSSILGPHHLDEYVRVWAEYDPAAWGRMPYLDMYQMLRHMSPPLGLGKKCPARVAYKRLLRMDLPVADDNTVHFNSTLMALIRTALDIKIAKGGADKQQMDAELRKEMMAIWPNLSQKTLDLLVTPHKSTDLTVGKIYAAMMIMEYYRQSKAKKLQAMREEQDRTPLMFQRMEPPSPTQEGGPGQNALPSTQLDPGGALMAHESGLKESPSWVTQRAQEMFQKTGTWSPEQGPPTDMPNSQPNSQSVEMREMGRDGYSDSEHYLPMEGQGRAASMPRLPAENQRRRGRPRGNNLSTISDTSPMKRSASVLGPKARRLDDYSLERVPPEENQRHHQRRRDRSHRASERSLGRYTDVDTGLGTDLSMTTQSGDLPSKERDQERGRPKDRKHRQHHHHHHHHHHPPPPDKDRYAQERPDHGRARARDQRWSRSPSEGREHMAHRQ

SEQ ID NO: 64 - DNA, 2717 bp, Homo sapiens
  ref <308>: DATABASE ACCESSION NUMBER: NCBI / NM_153480
  ref <309>: DATABASE ENTRY DATE: 2014-02-26
  ref <313>: RELEVANT RESIDUES IN SEQ ID NO: (1)..(2717)
cgagggctcctgctggtactgtgttcgctgctgcacagcaaggccctgccacccaccttcaggccatgcagccatgttccgggagccctaattgcacagaagcccatggggagctccagactggcagccctgctcctgcctctcctcctcatagtcatcgacctctctgactctgctgggattggctttcgccacctgccccactggaacacccgctgtcctctggcctcccacacggatgacagtttcactggaagttctgcctatatcccttgccgcacctggtgggccctcttctccacaaagccttggtgtgtgcgagtctggcactgttcccgctgtttgtgccagcatctgctgtcaggtggctcaggtcttcaacggggcctcttccacctcctggtgcagaaatccaaaaagtcttccacattcaagttctataggagacacaagatgccagcacctgctcagaggaagctgctgcctcgtcgtcacctgtctgagaagagccatcacatttccatcccctccccagacatctcccacaagggacttcgctctaaaaggacccaaccttcggatccagagacatgggaaagtcttcccagattggactcacaaaggcatggaggacccgagttctcctttgatttgctgcctgaggcccgggctattcgggtgaccatatcttcaggccctgaggtcagcgtgcgtctttgtcaccagtgggcactggagtgtgaagagctgagcagtccctatgatgtccagaaaattgtgtctgggggccacactgtagagctgccttatgaattccttctgccctgtctgtgcatagaggcatcctacctgcaagaggacactgtgaggcgcaaaaaatgtcccttccagagctggccagaagcctatggctcggacttctggaagtcagtgcacttcactgactacagccagcacactcagatggtcatggccctgacactccgctgcccactgaagctggaagctgccctctgccagaggcacgactggcataccctttgcaaagacctcccgaatgccacagctcgagagtcagatgggtggtatgttttggagaaggtggacctgcacccccagctctgcttcaagttctcttttggaaacagcagccatgttgaatgcccccaccagactgggtctctcacatcctggaatgtaagcatggatacccaagcccagcagctgattcttcacttctcctcaagaatgcatgccaccttcagtgctgcctggagcctcccaggcttggggcaggacactttggtgccccccgtgtacactgtcagccaggcccggggctcaagcccagtgtcactagacctcatcattcccttcctgaggccagggtgctgtgtcctggtgtggcggtcagatgtccagtttgcctggaagcacctcttgtgtccggatgtctcttacagacacctggggctcttgatcctggcactgctggccctcctcaccctactgggtgttgttctggccctcacctgccggcgcccacagtcaggcccgggcccagcgcggccagtgctcctcctgcacgcggcggactcggaggcgcagcggcgcctggtgggagcgctggctgaactgctacgggcagcgctgggcggcgggcgcgacgtgatcgtggacctgtgggaggggaggcacgtggcgcgcgtgggcccgctgccgtggctctgggcggcgcggacgcgcgtagcgcgggagcagggcactgtgctgctgctgtggagcggcgccgaccttcgcccggtcagcggccccgacccccgcgccgcgcccctgctcgccctgctccacgctgccccgcgcccgctgctgctgctcgcttacttcagtcgcctctgcgccaagggcgacatccccccgccgctgcgcgccctgccgcgctaccgcctgctgcgcgacctgccgcgtctgctgcgggcgctggacgcgcggcctttcgcagaggccaccagctggggccgccttggggcgcggcagcgcaggcagagccgcctagagctgtgcagccggctcgaacgagaggccgcccgacttgcagacctaggttgagcagagctccaccgcagtcccgggtgtctgcggccgcaacgcaacggacactggctggaaccccggaatgagccttcgaccctgaaatccttggggtgcctcgaggacgactggccgaaaagccgcattccctgcctcacaggccggaagtcccagcccagtccccgcgcgcgtccctcttcctcctcatactttcccttgactgagagctcctctaacccctgttctgatgggggagggcggtcttcccacttcctctccagaactccagaaagagcagtgtgcttatgcttcagtccaggctggagaggttggggccggggtagggaggcaggagccatgtcagttctgaaggagggtgaggcggtgggggattgcagggggcggctgagagaaaacctccttgggggccagggattccctttcccactctgaggctctggccagagggagagaggactctggacctaggaaaagaggcttttggctccaggtggtcaggacagtgggggttgggggtggggtgggtgggtgctggcggtggggaccaagatccggaaagatgaataaagacaaacatgacaaactaagaaaaaaaaaaaaaaaaa

SEQ ID NO: 65 - protein, 667 aa, Homo sapiens
  ref <308>: DATABASE ACCESSION NUMBER: NCBI / NP_705613.1
  ref <309>: DATABASE ENTRY DATE: 2014-02-26
  ref <313>: RELEVANT RESIDUES IN SEQ ID NO: (1)..(667)
MGSSRLAALLLPLLLIVIDLSDSAGIGFRHLPHWNTRCPLASHTDDSFTGSSAYIPCRTWWALFSTKPWCVRVWHCSRCLCQHLLSGGSGLQRGLFHLLVQKSKKSSTFKFYRRHKMPAPAQRKLLPRRHLSEKSHHISIPSPDISHKGLRSKRTQPSDPETWESLPRLDSQRHGGPEFSFDLLPEARAIRVTISSGPEVSVRLCHQWALECEELSSPYDVQKIVSGGHTVELPYEFLLPCLCIEASYLQEDTVRRKKCPFQSWPEAYGSDFWKSVHFTDYSQHTQMVMALTLRCPLKLEAALCQRHDWHTLCKDLPNATARESDGWYVLEKVDLHPQLCFKFSFGNSSHVECPHQTGSLTSWNVSMDTQAQQLILHFSSRMHATFSAAWSLPGLGQDTLVPPVYTVSQARGSSPVSLDLIIPFLRPGCCVLVWRSDVQFAWKHLLCPDVSYRHLGLLILALLALLTLLGVVLALTCRRPQSGPGPARPVLLLHAADSEAQRRLVGALAELLRAALGGGRDVIVDLWEGRHVARVGPLPWLWAARTRVAREQGTVLLLWSGADLRPVSGPDPRAAPLLALLHAAPRPLLLLAYFSRLCAKGDIPPPLRALPRYRLLRDLPRLLRALDARPFAEATSWGRLGARQRRQSRLELCSRLEREAARLADLG

SEQ ID NO: 66 - DNA, 2338 bp, Homo sapiens
  ref <308>: DATABASE ACCESSION NUMBER: NCBI / NM_033260.3
  ref <309>: DATABASE ENTRY DATE: 2014-05-10
  ref <313>: RELEVANT RESIDUES IN SEQ ID NO: (1)..(2338)
ctcaacgtcgaaccgaaggcgacacccacccaactcctccctctccgccccatagtccacccaacacttgcagcccctccagagaaaaagcccagcggaagaggactccggaaaagtgactatctcggaagaccagggtagagctcccgggagaaaaaggcgaagatccccggccccggatcgccatccccttccctggcaccagcttctctaggctgcgcgaaggaagagggtacgacgccggggagggactgggtgcgcgggcatgaagttggaggtgttcgtccctcgcgcggcccacggggacaagcagggcagtgacctggagggcgcgggcggcagcgacgcgccgtccccgctgtcggcggcgggagacgactccctgggctcagatggggactgcgcggccaacagcccggccgcgggcggcggcgccagagatacgcagggcgacggcgaacagagtgcgggaggcgggccgggcgcggaggaggcgatcccggcagcagctgctgcagcggtggtggcggagggcgcggaggccggggcggcggggccaggcgcgggcggcgcggggagcggcgagggtgcacgcagcaagccatatacgcggcggcccaagcccccctactcgtacatcgcgctcatcgccatggccatccgcgactcggcgggcgggcgcttgacgctggcggagatcaacgagtacctcatgggcaagttcccctttttccgcggcagctacacgggctggcgcaactccgtgcgccacaacctttcgctcaacgactgcttcgtcaaggtgctgcgcgacccctcgcggccctggggcaaggacaactactggatgctcaaccccaacagcgagtacaccttcgccgacggggtcttccgccgccgccgcaagcgcctcagccaccgcgcgccggtccccgcgcccgggctgcggcccgaggaggccccgggcctccccgccgccccgccgcccgcgcccgccgccccggcctcgccccgcatgcgctcgcccgcccgccaggaggagcgcgccagccccgcgggcaagttctccagctccttcgccatcgacagcatcctgcgcaagcccttccgcagccgccgcctcagggacacggcccccgggacgacgcttcagtggggcgccgcgccctgcccgccgctgcccgcgttccccgcgctcctccccgcggcgccctgcagggccctgctgccgctctgcgcgtacggcgcgggcgagccggcgcggctgggcgcgcgcgaggccgaggtgccaccgaccgcgccgcccctcctgcttgcacctctcccggcggcggcccccgccaagccactccgaggcccggcggccggcggcgcgcacctgtactgccccctgcggctgcccgcagccctgcaggcggcctcagtccgccgccctggcccgcacctgccgtacccggtggagacgctcctagcctgagtagcgccgcggggcccgggaacgccgagtgcgcgccgtcggggaggcgggaacgcgggcccgcgcgcggactttgcactttgaatccagaggaagatgaatttttaaaatctccatcaaacgtgccttaaagctaaagcattttgacaggagtatttaaacttagtccaggatattttcctttgtgttttataactttacagaggaccaaagcaattcttgttttagtttctttgcgaagcctgctcctccttcccttcataaggactttttttgtctttctttaacgcccaggcttcgtcttatttctactgtttttgtcgcaacttccattgatttatgtcccttccctcccccctaagtacatcagggaacctttccacactataaatgatatgactactgtttggggtttctgggcccccatccgtgtacgtatgtggcatttccaggtatgactgagtgtgagagacatgtcagaggctcttcagtgatttcttgctattgaccgatgcttcactgtgccaaaagagaaaaaaaatgttgggttttgtaattaaattatttatatatttttgaaacccgaattgaaaatgttgcaggcaacgggctacagctttattagtggttctctaactgtggtctccttgggccaagcaatttctttaaaggaaaagttgattatgtatgtggggtgccaggaccactgccttgaaagcaagtgtgatttttatttttaatattattttatttgtgtctgtgtacatattcatgtataaattttatgaaacccaagcatagtgcttattttttaataaaacaactgacttaacacattgtgaaaaaaaaaaaaaaaaaaaa

SEQ ID NO: 67 - protein, 403 aa, Homo sapiens
  ref <308>: DATABASE ACCESSION NUMBER: NCBI NP_150285.3
  ref <309>: DATABASE ENTRY DATE: 2014-05-10
  ref <313>: RELEVANT RESIDUES IN SEQ ID NO: (1)..(403)
MKLEVFVPRAAHGDKQGSDLEGAGGSDAPSPLSAAGDDSLGSDGDCAANSPAAGGGARDTQGDGEQSAGGGPGAEEAIPAAAAAAVVAEGAEAGAAGPGAGGAGSGEGARSKPYTRRPKPPYSYIALIAMAIRDSAGGRLTLAEINEYLMGKFPFFRGSYTGWRNSVRHNLSLNDCFVKVLRDPSRPWGKDNYWMLNPNSEYTFADGVFRRRRKRLSHRAPVPAPGLRPEEAPGLPAAPPPAPAAPASPRMRSPARQEERASPAGKFSSSFAIDSILRKPFRSRRLRDTAPGTTLQWGAAPCPPLPAFPALLPAAPCRALLPLCAYGAGEPARLGAREAEVPPTAPPLLLAPLPAAAPAKPLRGPAAGGAHLYCPLRLPAALQAASVRRPGPHLPYPVETLLA

SEQ ID NO: 68 - DNA, 2974 bp, Homo sapiens
  ref <308>: DATABASE ACCESSION NUMBER: NCBI / NM_000909.5
  ref <309>: DATABASE ENTRY DATE: 2014-05-10
  ref <313>: RELEVANT RESIDUES IN SEQ ID NO: (1)..(2974)
gtctgtgtcgaataatgtgtggcttctgttggattgcttttctttccaaaattcctaggcaatgcttccccgaggtgtgcacctttgtgaggtgtttgtggggttgggggagcttcaggcgctactcgcgggacgccgtcacgtgatccgggatgaggtggagttcggctttaaggaggcgtctcttcctagcttcatcaatctttaggatctgagcaggagaaataccagcggatcttccccactctgctcccttccattcccacccttccttctttaataagcaggagcgaaaaagacaaattccaaagaggattgttcagttcaagggaatgaagaattcagaataattttggtaaatggattccaatatggggaataagaataagctgaacagttgacctgctttgaagaaacatactgtccatttgtctaaaataatctataacaaccaaaccaatcaaaatgaattcaacattattttcccaggttgaaaatcattcagtccactctaatttctcagagaagaatgcccagcttctggcttttgaaaatgatgattgtcatctgcccttggccatgatatttaccttagctcttgcttatggagctgtgatcattcttggtgtctctggaaacctggccttgatcataatcatcttgaaacaaaaggagatgagaaatgttaccaacatcctgattgtgaacctttccttctcagacttgcttgttgccatcatgtgtctcccctttacatttgtctacacattaatggaccactgggtctttggtgaggcgatgtgtaagttgaatccttttgtgcaatgtgtttcaatcactgtgtccattttctctctggttctcattgctgtggaacgacatcagctgataatcaaccctcgagggtggagaccaaataatagacatgcttatgtaggtattgctgtgatttgggtccttgctgtggcttcttctttgcctttcctgatctaccaagtaatgactgatgagccgttccaaaatgtaacacttgatgcgtacaaagacaaatacgtgtgctttgatcaatttccatcggactctcataggttgtcttataccactctcctcttggtgctgcagtattttggtccactttgttttatatttatttgctacttcaagatatatatacgcctaaaaaggagaaacaacatgatggacaagatgagagacaataagtacaggtccagtgaaaccaaaagaatcaatatcatgctgctctccattgtggtagcatttgcagtctgctggctccctcttaccatctttaacactgtgtttgattggaatcatcagatcattgctacctgcaaccacaatctgttattcctgctctgccacctcacagcaatgatatccacttgtgtcaaccccatattttatgggttcctgaacaaaaacttccagagagacttgcagttcttcttcaacttttgtgatttccggtctcgggatgatgattatgaaacaatagccatgtccacgatgcacacagatgtttccaaaacttctttgaagcaagcaagcccagtcgcatttaaaaaaatcaacaacaatgatgataatgaaaaaatctgaaactacttatagcctatggtcccggatgacatctgtttaaaaacaagcacaacctgcaacatactttgattacctgttctcccaaggaatggggttgaaatcatttgaaaatgactaagattttcttgtcttgctttttactgcttttgttgtagttgtcataattacatttggaacaaaaggtgtgggctttggggtcttctggaaatagttttgaccagacatctttgaagtgctttttgtgaatttatgcatataatataaagacttttatactgtacttattggaatgaaatttctttaaagtattactattaactgacttcagaagtacctgccatccaatacggtcattagattgggtcatcttgattagattagattagattagattgtcaacagattgggccatccttactttatgataggcatcattttagtgtgttacaatagtaacagtatgcaaaagcagcattcaggagccgaaagatagtctgaagtcattcagaagtggtttgaggtttctgttttttggtggtttttgtttgttttttttttttttcaccttaagggaggatttaatttgctcccaactgattgtcacttaaatgaaaatttaaaaatgaataaaaagacatacttctcagctgcaaatattatggagaattggggcacccacaggaatgaagagagaaagcagctccctaacttcaaaaccattttggtacctgacaacaagagcattttagagtaattaatttaataaagtaaattagtattgctgcaaatagttaaattatatttatttgaattgatggtcaagagattttccattttttttacagactgttcagtgtttgtcaagctttctggcataaatatgtactcaaaaggcatttccgcttacaatttgtagaaacacaaaatgcgttttccatacagcagtgcctatatagtgactgatttttaactttcaatgtccatctttcaaaggaagtaacaccaaggtacaatgttaaaggaatattcactttacctagcagggaaaaatacacaaaaactgcagatacttcatatagcccattttaacttgtataaactgtgtgacttgtggcgtcttataaataatgcactgtaaagattactgaatagttgtgtcatgttaatgtgcctaatttcatgtatcttgtaatcatgattgagcctcagaatcatttggagaaactatattttaaagaacaagacatacttcaatgtattatacagataaagtattacatgtgtttgattttaaaagggcggacattttattaaaatcaatattgtttttgctttttcaaaaaaaaaaaaaaaa

SEQ ID NO: 69 - protein, 384 aa, Homo sapiens
  ref <308>: DATABASE ACCESSION NUMBER: NCBI / NP_000900.1
  ref <309>: DATABASE ENTRY DATE: 2014-05-10
  ref <313>: RELEVANT RESIDUES IN SEQ ID NO: (1)..(384)
MNSTLFSQVENHSVHSNFSEKNAQLLAFENDDCHLPLAMIFTLALAYGAVIILGVSGNLALIIIILKQKEMRNVTNILIVNLSFSDLLVAIMCLPFTFVYTLMDHWVFGEAMCKLNPFVQCVSITVSIFSLVLIAVERHQLIINPRGWRPNNRHAYVGIAVIWVLAVASSLPFLIYQVMTDEPFQNVTLDAYKDKYVCFDQFPSDSHRLSYTTLLLVLQYFGPLCFIFICYFKIYIRLKRRNNMMDKMRDNKYRSSETKRINIMLLSIVVAFAVCWLPLTIFNTVFDWNHQIIATCNHNLLFLLCHLTAMISTCVNPIFYGFLNKNFQRDLQFFFNFCDFRSRDDDYETIAMSTMHTDVSKTSLKQASPVAFKKINNNDDNEKI

SEQ ID NO: 70 - DNA, 3947 bp, Homo sapiens
  ref <308>: DATABASE ACCESSION NUMBER: NCBI / NM_003654.5
  ref <309>: DATABASE ENTRY DATE: 2014-05-05
  ref <313>: RELEVANT RESIDUES IN SEQ ID NO: (1)..(3947)
gggggtggagccgggaccgcagcgcctgccgctcgctcggagctgtagccgccgctgccgccgctgctcttggctcggggacgcgggcgggcgctccgagaggctctggtgcctgcggctgctgctctcctccggcgcccggggctgcggcgctccgggtcccggcccctgtcccggcatctctcgggtccctgagccccggccccgggtcccgcgtccggccggagagaacgcactcagctgctcgagccgccccgggctcgcgcccccgggccatgaagaggggcccgtgaggcgcgcgcggagtcggaggaagaggagggaggagggaggccgaggaggagggcgcgggaggcggaggatgccgccgcggctgctgccgccgccgccacccgcgggtccccggcgaccctgactccagacccgaggatggagccggcgctgggcgctgcagctgctcccggcgcgtccccgaccaggtagctggtgtcacttcggtgtggttggaagaagactttctccccagctgcattcccggaggcgccctttcgacctggaggccgggtctgctggccacagggctgccgcactggctgggactgccagctgggcctggagacgctggtggctgtggactccccagcttggagcagtccctctttgacctcaccccttggagaagcagccccatgaaggtgcccagccatgcaatgttcctggaaggccgtcctcctccttgccctggcctccattgccatccagtacacggccatccgcaccttcaccgccaagtcctttcacacctgccccgggctggcagaggccgggctggccgagcgactgtgcgaggagagccccaccttcgcctacaacctctcccgcaagacccacatcctcatcctggccaccacgcgcagtggctcctccttcgtgggccagctcttcaaccagcacctggacgtcttctacctgtttgagcccctctaccacgtccagaacacgctcatcccccgcttcacccagggcaagagcccggccgaccggcgggtcatgctaggcgccagccgcgacctcctgcggagcctctacgactgcgacctctacttcctggagaactacatcaagccgccgccggtcaaccacaccaccgacaggatcttccgccgcggggccagccgggtcctctgctcccggcctgtgtgcgaccctccggggccagccgacctggtcctggaggagggggactgtgtgcgcaagtgcgggctactcaacctgaccgtggcggccgaggcgtgccgcgagcgcagccacgtggccatcaagacggtgcgcgtgcccgaggtgaacgacctgcgcgccctggtggaagacccgcgattaaacctcaaggtcatccagctggtccgagacccccgcggcattctggcttcgcgcagcgagaccttccgcgacacgtaccggctctggcggctctggtacggcaccgggaggaaaccctacaacctggacgtgacgcagctgaccacggtgtgcgaggacttctccaactccgtgtccaccggcctcatgcggcccccgtggctcaagggcaagtacatgttggtgcgctacgaggacctggctcggaaccctatgaagaagaccgaggagatctacgggttcctgggcatcccgctggacagccacgtggcccgctggatccagaacaacacgcggggcgaccccaccctgggcaagcacaaatacggcaccgtgcgaaactcggcggccacggccgagaagtggcgcttccgcctctcctacgacatcgtggcctttgcccagaacgcctgccagcaggtgctggcccagctgggctacaagatcgccgcctcggaggaggagctgaagaacccctcggtcagcctggtggaggagcgggacttccgccccttctcgtgacccgggcggtgcgggtgggggcgggaggcgcaaggtgtcggttttgataaaatggaccgtttttaactgttgccttattaacccctccctctcccacctcatcttcgtgtccttcctgcccccagctcaccccactcccttctgccccttttttgtctctgaaatttgcactacgtcttggacgggaatcactggggcagagggcgcctgaagtagggtcccgccccccccccccccattcagacacatggatgttgggtctctgtgcggacggtgacaatgtttacaagcaccacatttacacatccacacacgcacacgggcactcgcgaggcgacttctcaagcttttgaatgggtgagtggtcgggtatctagtttttgcactgtcttactattcaaggtaagaggatacaaacaagaggaccacttgtctctaatttatgaatggtgtccatcctttccccatccctgcctcctgcccctgacgcccatttccccccttagagcagcgaaactgccccctcctgcccgcccttgcctgtcggtgaggcaggtttttactgtgaggtgaacgtggacctgtttctgtttccagtctgtggtgatgctgtctgtctgtctgagtctcgtggccgcccctggaccagtgatgactgatgaatcttatgagcttctgattgatctcggggtccatctgtgatatttctttgtgccaaaaagaaaaaaaaagagtggatcagtttgctaaatgaacattgaaattgaaatgctttatctgtgttttctgtaaataaaagagtgcaataatctctgtgtgtgattgcaggacattctgaatgggtacgagagggcctcagccgggtctgggtgttcctagctttggggaggacagcgagagagaggtggaggtgggaattaaatgacaagtctgcctttcagaactcttgtcaccctcaacactgagtttagtttaggtttttgttttgttttgttttgagacagagtctcgctctgtcacccaggctggagtgcaatggcgccatctcggctcactgcaacctctgcctcccaggttcaagcagttctcccgcctcagcctcccgagtgactgggactacaggtgcacactgccacacctggctatttttttttttttttggattttagtagagacggggtttcaccgtgttgtccaggctggtcgcgaactcctgagctctgggcattcctcctgcctcagcctcccaaagtgctgggattgcagacttgagccacctcacccagccgttttttttttccttcagtcagttgagaccgggtaacttatagccagggataatgttcaaagtctttaacaagtggtatggcttgctgaatcagagtagctggaggtaagaatgacatcctggaatcccttcttgtgctaaatgttacccatttagttggtgggtctgggtctaggatagccagggagggggaaacttcaaggggtggggtgcctcagggcagtggctgctgacccacagacctggaagtatttgactatttgaataactggtacaggtttactggtgtctacactggcagagaatctgctgtgcttcctccccttcccttcgtggcaatctagcaggttgctccaggcagcttccccagctcttattccaagaaaacctgcccctggggtggctgcaggtcacagctttgttgtcctgggacaaaggagtgtctggtgattaggcagccccaggggtcctagccaactggaagaagggcttcctgaggaaacacagtcctgggctattttatatgtgtcaggaggatgtagacagttcaacagctctagcaaatgccttaactaatagtggcttaatcaagataggtgattttcttttgtaaaaaattttactggggtaaaataacagaatgtaaaatttaccatcttaacctttttaaggtgtaccattcattaaatacattcacaacgtgtgccaccaaaaaaaa

SEQ ID NO: 71 - protein, 411 aa, Homo sapiens
  ref <308>: DATABASE ACCESSION NUMBER: NCBI / NP_003645.1
  ref <309>: DATABASE ENTRY DATE: 2014-05-05
  ref <313>: RELEVANT RESIDUES IN SEQ ID NO: (1)..(411)
MQCSWKAVLLLALASIAIQYTAIRTFTAKSFHTCPGLAEAGLAERLCEESPTFAYNLSRKTHILILATTRSGSSFVGQLFNQHLDVFYLFEPLYHVQNTLIPRFTQGKSPADRRVMLGASRDLLRSLYDCDLYFLENYIKPPPVNHTTDRIFRRGASRVLCSRPVCDPPGPADLVLEEGDCVRKCGLLNLTVAAEACRERSHVAIKTVRVPEVNDLRALVEDPRLNLKVIQLVRDPRGILASRSETFRDTYRLWRLWYGTGRKPYNLDVTQLTTVCEDFSNSVSTGLMRPPWLKGKYMLVRYEDLARNPMKKTEEIYGFLGIPLDSHVARWIQNNTRGDPTLGKHKYGTVRNSAATAEKWRFRLSYDIVAFAQNACQQVLAQLGYKIAASEEELKNPSVSLVEERDFRPFS

SEQ ID NO: 72 - DNA, 941 bp, Homo sapiens
  ref <308>: DATABASE ACCESSION NUMBER: NCBI / NM_006744.3
  ref <309>: DATABASE ENTRY DATE: 2014-05-11
  ref <313>: RELEVANT RESIDUES IN SEQ ID NO: (1)..(941)
cgcctccctcgctccacgcgcgcccggactcggcggccaggcttgcgcgcggttcccctcccggtgggcggattcctgggcaagatgaagtgggtgtgggcgctcttgctgttggcggcgctgggcagcggccgcgcggagcgcgactgccgagtgagcagcttccgagtcaaggagaacttcgacaaggctcgcttctctgggacctggtacgccatggccaagaaggaccccgagggcctctttctgcaggacaacatcgtcgcggagttctccgtggacgagaccggccagatgagcgccacagccaagggccgagtccgtcttttgaataactgggacgtgtgcgcagacatggtgggcaccttcacagacaccgaggaccctgccaagttcaagatgaagtactggggcgtagcctcctttctccagaaaggaaatgatgaccactggatcgtcgacacagactacgacacgtatgccgtgcagtactcctgccgcctcctgaacctcgatggcacctgtgctgacagctactccttcgtgttttcccgggaccccaacggcctgcccccagaagcgcagaagattgtaaggcagcggcaggaggagctgtgcctggccaggcagtacaggctgatcgtccacaacggttactgcgatggcagatcagaaagaaaccttttgtagcaatatcaagaatctagtttcatctgagaacttctgattagctctcagtcttcagctctatttatcttaggagtttaatttgcccttctctccccatcttccctcagttcccataaaaccttcattacacataaagatacacgtgggggtcagtgaatctgcttgcctttcctgaaagtttctggggcttaagattccagactctgattcattaaactatagtcacccgtgtcctgtgaaaaaaaaaaaaa

SEQ ID NO: 73 - protein, 201 aa, Homo sapiens
  ref <308>: DATABASE ACCESSION NUMBER: NCBI / NP_006735.2
  ref <309>: DATABASE ENTRY DATE: 2014-05-11
  ref <313>: RELEVANT RESIDUES IN SEQ ID NO: (1)..(201)
MKWVWALLLLAALGSGRAERDCRVSSFRVKENFDKARFSGTWYAMAKKDPEGLFLQDNIVAEFSVDETGQMSATAKGRVRLLNNWDVCADMVGTFTDTEDPAKFKMKYWGVASFLQKGNDDHWIVDTDYDTYAVQYSCRLLNLDGTCADSYSFVFSRDPNGLPPEAQKIVRQRQEELCLARQYRLIVHNGYCDGRSERNLL

SEQ ID NO: 74 - DNA, 1861 bp, Homo sapiens
  ref <308>: DATABASE ACCESSION NUMBER: NCBI / NM_000304.3
  ref <309>: DATABASE ENTRY DATE: 2014-05-26
  ref <313>: RELEVANT RESIDUES IN SEQ ID NO: (1)..(1861)
aataaactggaaagacgcctggtctggcttcagttacagggagcaccaccagggaacatctcggggagcctggttggaagctgcaggcttagtctgtcggctgcgggtctctgactgccctgtggggagggtcttgccttaacatcccttgcatttggctgcaaagaaatctgcttggaagaaggggttacgctgtttggccgggcagaaactccgctgagcagaacttgccgccagaatgctcctcctgttgctgagtatcatcgtcctccacgtcgcggtgctggtgctgctgttcgtctccacgatcgtcagccaatggatcgtgggcaatggacacgcaactgatctctggcagaactgtagcacctcttcctcaggaaatgtccaccactgtttctcatcatcaccaaacgaatggctgcagtctgtccaggccaccatgatcctgtcgatcatcttcagcattctgtctctgttcctgttcttctgccaactcttcaccctcaccaaggggggcaggttttacatcactggaatcttccaaattcttgctggtctgtgcgtgatgagtgctgcggccatctacacggtgaggcacccggagtggcatctcaactcggattactcctacggtttcgcctacatcctggcctgggtggccttccccctggcccttctcagcggtgtcatctatgtgatcttgcggaaacgcgaatgaggcgcccagacggtctgtctgaggctctgagcgtacatagggaagggaggaagggaaaacagaaagcagacaaagaaaaaagagctagcccaaaatcccaaactcaaaccaaaccaaacagaaagcagtggaggtgggggttgctgttgattgaagatgtatataatatctccggtttataaaacctatttataacactttttacatatatgtacatagtattgtttgctttttatgttgaccatcagcctcgtgttgagccttaaagaagtagctaaggaactttacatcctaacagtataatccagctcagtatttttgttttgttttttgtttgtttgttttgttttacccagaaataagataactccatctcgccccttccctttcatctgaaagaagatacctccctcccagtccacctcatttagaaaaccaaagtgtgggtagaaaccccaaatgtccaaaagcccttttctggtgggtgacccagtgcatccaacagaaacagccgctgcccgaacctctgtgtgaagctttacgcgcacacggacaaaatgcccaaactggagcccttgcaaaaacacggcttgtggcattggcatacttgcccttacaggtggagtatcttcgtcacacatctaaatgagaaatcagtgacaacaagtctttgaaatggtgctatggatttaccattccttattatcactaatcatctaaacaactcactggaaatccaattaacaattttacaacataagatagaatggagacctgaataattctgtgtaatataaatggtttataactgcttttgtacctagctaggctgctattattactataatgagtaaatcataaagccttcatcactcccacatttttcttacggtcggagcatcagaacaagcgtctagactccttgggaccgtgagttcctagagcttggctgggtctaggctgttctgtgcctccaaggactgtctggcaatgacttgtattggccaccaactgtagatgtatatatggtgcccttctgatgctaagactccagaccttttgtttttgctttgcattttctgattttataccaactgtgtggactaagatgcattaaaataaacatcagagtaactcact

SEQ ID NO: 75 - protein, 160 aa, Homo sapiens
  ref <308>: DATABASE ACCESSION NUMBER: NCBI / NP_000295.1
  ref <309>: DATABASE ENTRY DATE: 2014-05-26
  ref <313>: RELEVANT RESIDUES IN SEQ ID NO: (1)..(160)
MLLLLLSIIVLHVAVLVLLFVSTIVSQWIVGNGHATDLWQNCSTSSSGNVHHCFSSSPNEWLQSVQATMILSIIFSILSLFLFFCQLFTLTKGGRFYITGIFQILAGLCVMSAAAIYTVRHPEWHLNSDYSYGFAYILAWVAFPLALLSGVIYVILRKRE

SEQ ID NO: 76 - DNA, 710 bp, Homo sapiens
  ref <308>: DATABASE ACCESSION NUMBER: NCBI / NM_002962.1
  ref <309>: DATABASE ENTRY DATE: 2014-02-08
  ref <313>: RELEVANT RESIDUES IN SEQ ID NO: (1)..(710)
tcccacacttctgaggttttctttccaggacagcctggtttcccttcttcggcttattgttccatcagatttcagattttgagttctgatttttggtcagaagagtaaagtttctgggattggggacgtgtgtgctatgggaactcagtgtgtccccagcccttgtttgtaaacaaggaagggacagagatcagggaaataaaggcagaaggcagtgagagggaggctatgcctgctgcttggattctctgggctcactcccacagtgagctgcacactgtgatggagactcctctggagaaggccctgaccactatggtgaccacgtttcacaaatattcggggagagagggtagcaaactgaccctgagtaggaaggaactcaaggagctgatcaagaaagagctgtgtcttggggagatgaaggagagcagcatcgatgacttgatgaagagcctggacaagaacagcgaccaggagatcgacttcaaggagtactcggtgttcctgaccatgctgtgcatggcctacaacgacttctttctagaggacaacaagtgaccagggctgccctccaccctcaccctccaccctttgctgctgacctcggctgctcctctcacagaccctctttggccccctgccctcctctccctcccagatggacccttccatgggaggaaataaagtttccatcgcaggtgctggga

SEQ ID NO: 77 - protein, 92 aa, Homo sapiens
  ref <308>: DATABASE ACCESSION NUMBER: NCBI / NP_002953.2
  ref <309>: DATABASE ENTRY DATE: 2014-02-08
  ref <313>: RELEVANT RESIDUES IN SEQ ID NO: (1)..(92)
METPLEKALTTMVTTFHKYSGREGSKLTLSRKELKELIKKELCLGEMKESSIDDLMKSLDKNSDQEIDFKEYSVFLTMLCMAYNDFFLEDNK

SEQ ID NO: 78-79 - skipped (2 entries)

SEQ ID NO: 80 - DNA, 922 bp, Homo sapiens
  ref <308>: DATABASE ACCESSION NUMBER: NCBI / NM_005855.2
  ref <309>: DATABASE ENTRY DATE: 2014-03-16
  ref <313>: RELEVANT RESIDUES IN SEQ ID NO: (1)..(922)
gcggccgccgcctcccaccgctcccgcgcccgctcccgcccccggcgcgtctcctccgggcccgcgccgcggcgggctcagtcctcagcggggcgcgtggcgagcggactcgactcggcaccgctgtgcaccatggcccgggccctgtgccgcctcccgcggcgcggcctctggctgctcctggcccatcacctcttcatgaccactgcctgccaggaggctaactacggtgccctcctccgggagctctgcctcacccagttccaggtagacatggaggccgtcggggagacgctgtggtgtgactggggcaggaccatcaggagctacagggagctggccgactgcacctggcacatggcggagaagctgggctgcttctggcccaatgcagaggtggacaggttcttcctggcagtgcatggccgctacttcaggagctgccccatctcaggcagggccgtgcgggacccgcccggcagcatcctctaccccttcatcgtggtccccatcacggtgaccctgctggtgacggcactggtggtctggcagagcaagcgcactgagggcattgtgtaggcggggcccaggctgcccgcgggtgcacccaggctgcagggtgaggccaggcaggcctgggtaggggcagcttctggagccttgggacagagcaggcccacaatgccccccttcttccagccaagaagagctcacaggagtccagagtagccgaggctctggtattaacctggaagcccccctggctggaggccaccgccaccctaggaagggggcagggacgtgaccttgacttacctctggaaagggtcccagcctagactgcttaccccatagccacatttgtggatgagtggtttgtgattaaaagggatgttcttgaacttggaaaaaaaaaaaaaaa

SEQ ID NO: 81 - protein, 148 aa, Homo sapiens
  ref <308>: DATABASE ACCESSION NUMBER: NCBI / NP_005846.1
  ref <309>: DATABASE ENTRY DATE: 2014-03-16
  ref <313>: RELEVANT RESIDUES IN SEQ ID NO: (1)..(148)
MARALCRLPRRGLWLLLAHHLFMTTACQEANYGALLRELCLTQFQVDMEAVGETLWCDWGRTIRSYRELADCTWHMAEKLGCFWPNAEVDRFFLAVHGRYFRSCPISGRAVRDPPGSILYPFIVVPITVTLLVTALVVWQSKRTEGIV

SEQ ID NO: 82 - DNA, 512 bp, Homo sapiens
  ref <308>: DATABASE ACCESSION NUMBER: NCBI / NM_002961.2
  ref <309>: DATABASE ENTRY DATE: 2014-05-04
  ref <313>: RELEVANT RESIDUES IN SEQ ID NO: (1)..(512)
attcttcccctctctacaaccctctctcctcagcgcttcttctttcttggtttgatcctgactgctgtcatggcgtgccctctggagaaggccctggatgtgatggtgtccaccttccacaagtactcgggcaaagagggtgacaagttcaagctcaacaagtcagaactaaaggagctgctgacccgggagctgcccagcttcttggggaaaaggacagatgaagctgctttccagaagctgatgagcaacttggacagcaacagggacaacgaggtggacttccaagagtactgtgtcttcctgtcctgcatcgccatgatgtgtaacgaattctttgaaggcttcccagataagcagcccaggaagaaatgaaaactcctctgatgtggttggggggtctgccagctggggccctccctgtcgccagtgggcacttttttttttccaccctggctccttcagacacgtgcttgatgctgagcaagttcaataaagattcttggaagttt

SEQ ID NO: 83 - protein, 101 aa, Homo sapiens
  ref <308>: DATABASE ACCESSION NUMBER: NCBI / NP_002952.1
  ref <309>: DATABASE ENTRY DATE: 2014-05-04
  ref <313>: RELEVANT RESIDUES IN SEQ ID NO: (1)..(101)
MACPLEKALDVMVSTFHKYSGKEGDKFKLNKSELKELLTRELPSFLGKRTDEAAFQKLMSNLDSNRDNEVDFQEYCVFLSCIAMMCNEFFEGFPDKQPRKK

SEQ ID NO: 84 - DNA, 5954 bp, Homo sapiens
  ref <308>: DATABASE ACCESSION NUMBER: NCBI / NM_004822.2
  ref <309>: DATABASE ENTRY DATE: 2014-03-06
  ref <313>: RELEVANT RESIDUES IN SEQ ID NO: (1)..(5954)
cttcgggggcgagcgcgcgtgtgtgtgagtgcgcgccggccagcgcgccttctgcggcaggcggacagatcctcggcgcggcagggccggggcaagctggacgcagcatgatgcgcgcagtgtgggaggcgctggcggcgctggcggcggtggcgtgcctggtgggcgcggtgcgcggcgggcccgggctcagcatgttcgcgggccaggcggcgcagcccgatccctgctcggacgagaacggccacccgcgccgctgcatcccggactttgtcaatgcggccttcggcaaggacgtgcgcgtgtccagcacctgcggccggcccccggcgcgctactgcgtggtgagcgagcgcggcgaggagcggctgcgctcgtgccacctctgcaacgcgtccgaccccaagaaggcgcacccgcccgccttcctcaccgacctcaacaacccgcacaacctgacgtgctggcagtccgagaactacctgcagttcccgcacaacgtcacgctcacactgtccctcggcaagaagttcgaagtgacctacgtgagcctgcagttctgctcgccgcggcccgagtccatggccatctacaagtccatggactacgggcgcacgtgggtgcccttccagttctactccacgcagtgccgcaagatgtacaaccggccgcaccgcgcgcccatcaccaagcagaacgagcaggaggccgtgtgcaccgactcgcacaccgacatgcgcccgctctcgggcggcctcatcgccttcagcacgctggacgggcggccctcggcgcacgacttcgacaactcgcccgtgctgcaggactgggtcacggccacagacatccgcgtggccttcagccgcctgcacacgttcggcgacgagaacgaggacgactcggagctggcgcgcgactcgtacttctacgcggtgtccgacctgcaggtgggcggccggtgcaagtgcaacggccacgcggcccgctgcgtgcgcgaccgcgacgacagcctggtgtgcgactgcaggcacaacacggccggcccggagtgcgaccgctgcaagcccttccactacgaccggccctggcagcgcgccacagcccgcgaagccaacgagtgcgtggcctgtaactgcaacctgcatgcccggcgctgccgcttcaacatggagctctacaagctttcggggcgcaagagcggaggtgtctgcctcaactgtcgccacaacaccgccggccgccactgccattactgcaaggagggctactaccgcgacatgggcaagcccatcacccaccggaaggcctgcaaagcctgtgattgccaccctgtgggtgctgctggcaaaacctgcaaccaaaccaccggccagtgtccctgcaaggacggcgtgacgggtatcacctgcaaccgctgcgccaaaggctaccagcagagccgctctcccatcgccccctgcataaagatccctgtagcgccgccgacgactgcagccagcagcgtggaggagcctgaagactgcgattcctactgcaaggcctccaaggggaagctgaagattaacatgaaaaagtactgcaagaaggactatgccgtccagatccacatcctgaaggcggacaaggcgggggactggtggaagttcacggtgaacatcatctccgtgtataagcagggcacgagccgcatccgccgcggtgaccagagcctgtggatccgctcgcgggacatcgcctgcaagtgtcccaaaatcaagcccctcaagaagtacctgctgctgggcaacgcggaggactctccggaccagagcggcatcgtggccgataaaagcagcctggtgatccagtggcgggacacgtgggcgcggcggctgcgcaagttccagcagcgtgagaagaagggcaagtgcaagaaggcctagcgccgaggcagcgggcgggcgggcgggcgggcgccagggcggggccgagcgagagcgggcgccttggcccggccgccgcggacttggcccgcgagggctttcccaggtggggggagggagggggcggggccgcacggcgcggggggcgggaccctcggcggcccctccccctacccccaccctgcgcgctctgggcgggagccgcgtgcacgcggggcggggtgcgccgccggccgggccctggagaaatgacgagacgtagctacctcacggggctccttccagagcagagacgcgcttccctgggcctgggcgcggccgccgtggaggggctgggggcagcctgccctggggcccgggggcgggcgcagaatcgcacaactggggccccaggcgcggggcgtggatggcgcggagacgtggacgggaggagaactgtgaattctcaagcccgtagtgtgggcggggcgcggagcacccaccaaaccaccacccgacacgcagccgacgggatccccccctttctccccggccccttctagcagttccccgcgggccacctggctgtcacagcctggactcctccatctgaaggggcctggcagcatttggggagtggacagctcctgtccagccagcatgccccaggcggcctctgtctccactgctacctgctgagtgggtcctactgggtgggggcttggggtcggtgagtggttcacctgtggagagaggagaggaagcccctgctgctgcctgtctctgcccctgcccctgcccctgcccagcgtggggctggcccatccggaaggcagtgggcccagggacacccctgagaagcccaagccgggtggtcaccgcctcatgctggagctgcctgttggaggaggcatcgcaaacgcaaaacctcccagagagtttccttttggaaacttggaaccagccctttttatgacgttttccagggggagggggaggggcactggctgggtttacggcagtgacactatttatgtaaatgacatcagctcccgcaaggcccctcagcaatgtcaacagctggaaagggcctgaacgggcttggagtctgcaggctgcgaaggcacttgggcctggcttggggccgggggcttgtttgagctgggatggggtttgctggctcagtgaagtaccagagtgcctgagccatgggtgggcaggggcacaggaatgaccaggttcctgggggccaaggaggccatgctggcttctccaagggaaggcacagaggctgccggcctgccccctacagctgtcttgggtctggcctgggccacaccttgaccgtgcctttccagacggtctttgtggagtctgcccgtgccctccactgtgccccagccctccttccaaaatctcctagagacacggtcctcaagcaggcagccccttttgttctgacctcctcacacagggtccattcctgtgccctggggcctcctggctccctgccttcctgggctctctgcactgcccgggcctctggcccacatcctcacacccggcgcactgaattaagaggcctggctcccctcacagtcaggaaattggtttcactttcccggccagagtttggctgctcaaaagggtcataccaagtatgaagctcggcccccggtggtctggcttccctccgccttccccacatttacccgcatcacggctgccatttattgagcacctgctgtgtgccaggcactttacccacatgctcccagtgtgtactcatgacaaccctgtgggacagggactcattatcaccagcaaggagactggagtacacgtgcccaaggtcatgctgcaaattggtggcaggactggggctcaaactccagagcccgactttctgaccaggggccacgctggccctcactgcactccagctctgcagcctacccgcccaatccctgtgcaggctgggagggtgctcttgggggagtggccaccgagcccctggccctggttactgcctcttgaggacactggcatctgggctggagaacaggagcccggggtggggtagggcatggggacaatcacatcttcagaggaggcagcaaagtggtgcgggatgcagggacggacttgccagatggcagctccaggttccaggaaggcaggccttggatgctccgaagaggtggtagaaaggtgtttttagaaaggtgttttggctgcctcagggtggttggagagactccaggagagactggcagaggtgcctcaggggcagggagcagacagacctgccctgggaaggggcatttggcttccctgaatccagcccaaggctagaagacagggcccctctccaagctgtcagcgcccctcggatgcccagtgtggtgtgctgggcgccatcagcatcacaaggcactacgctgctggggcggttgtcctatttctgtctatgccagtgtggtttcttcaccctgcccagaagggctgtggcagccccacgatatcccaccctgggtctgggtctcacgggtgtcctgtgaggggcttgcatttgtggtggtctctgaggccacctcagcaacggagctggcgacacgccaagcaacaaggcatcttgcggaaaattcagccagtgtcctgcccctcccttcggctcagcaccccgcagggcacaggctgtccgcccggtggtctggcccttggggaatgcgtcagggtgaccagatccaccatgctagcagccaggtcactgttgggattgcacggtcgtcacgagctgcctttcctatccacacacccagccaggacccagcccaccactcccgactgcagccccggcctctgcggtgagcaccatccttgggaaagcacccctcctccactccggtgccccactccaaggagcagagggaaatgggaattgaggtgtcccggtttgtacagttaggaagggatgtaaaacggaactagattttgattttgaagagtgtattaaccagaattgtgctatgtaggtgtttgtttgaagaaaaacataccagattagtctttgtttttgaaacagcttccccagttgtcctttttcttaccagctgggtggtctggtgcccctgacagctgagtgcctgctttacggacacgcagtaatgccgaagatttgcgggggaggacatagggctgtccccgggattcacctgctggctgtggtctctgcccactgcttctgtccttggaaagcagggcaggaggcagcatccccaggggcctctatgtgggagggagggacacctggggtcacaacccagggagggagggtcacagcccagggaggctgggagctgctccaaggccctggaactctgcctcagtcgcggcatgctggagaggggtacggacttactttcttggagttgtcccaggttggaatgagactgaactcaagaagagaccctaagggactggggaatggttcctgccttcaggaaagtgaaagacgcttaggctgtcaacacttaaaggaagtccccttgaagcccagagtggacagactagacccattgatggggccactggccatggtccgtggacaagacattcctgtgggccatggcacaccgggggggatcaaaatgtgtacttgtggggtctcgccccttgccaaaagccaaaccagtcccactcctgtcattggacgtttcttcccattccctcctcccaaatgcacttcccctcctccctctgccccctcctgtgttttggatttctgttcactcagaattgtaaatgtttagttgtgaccatgacgtattgtttgggtcaatgtccctttccaatgcatactaatatattatggttattatatatgaatatatttaatgacatggaaaaagttgtggattttctttctttccttttttttgggggggggtggggggttggttagagttgtaatggacccagatggaacttgtaatgtgggccccacatgatagaactaaattcagatatcattaaataaactcttgtacacta

SEQ ID NO: 85 - protein, 604 aa, Homo sapiens
  ref <308>: DATABASE ACCESSION NUMBER: NCBI / NP_004813.2
  ref <309>: DATABASE ENTRY DATE: 2014-04-06
  ref <313>: RELEVANT RESIDUES IN SEQ ID NO: (1)..(604)
MMRAVWEALAALAAVACLVGAVRGGPGLSMFAGQAAQPDPCSDENGHPRRCIPDFVNAAFGKDVRVSSTCGRPPARYCVVSERGEERLRSCHLCNASDPKKAHPPAFLTDLNNPHNLTCWQSENYLQFPHNVTLTLSLGKKFEVTYVSLQFCSPRPESMAIYKSMDYGRTWVPFQFYSTQCRKMYNRPHRAPITKQNEQEAVCTDSHTDMRPLSGGLIAFSTLDGRPSAHDFDNSPVLQDWVTATDIRVAFSRLHTFGDENEDDSELARDSYFYAVSDLQVGGRCKCNGHAARCVRDRDDSLVCDCRHNTAGPECDRCKPFHYDRPWQRATAREANECVACNCNLHARRCRFNMELYKLSGRKSGGVCLNCRHNTAGRHCHYCKEGYYRDMGKPITHRKACKACDCHPVGAAGKTCNQTTGQCPCKDGVTGITCNRCAKGYQQSRSPIAPCIKIPVAPPTTAASSVEEPEDCDSYCKASKGKLKINMKKYCKKDYAVQIHILKADKAGDWWKFTVNIISVYKQGTSRIRRGDQSLWIRSRDIACKCPKIKPLKKYLLLGNAEDSPDQSGIVADKSSLVIQWRDTWARRLRKFQQREKKGKCKKA

SEQ ID NO: 86 - DNA, 1246 bp, Homo sapiens
  ref <308>: DATABASE ACCESSION NUMBER: NCBI / NM_007341.2
  ref <309>: DATABASE ENTRY DATE: 2014-02-26
  ref <313>: RELEVANT RESIDUES IN SEQ ID NO: (1)..(1246)
attttcctgacagatcccaaaatattcctgggccaatggagggaggagcccaagatgcctctgctgctccttggagagacagagcctcttaagttggagcgggactgccggagcccagtggacccctgggctgctgccagccccgacctggcacttgcttgcctgtgtcactgtcaggatttgtctagcggcgcattccctaacaggggtgtgttggggggagtcctctttccaactgtcgaaatggttatcaaagtgtttgttgctacatcttctgggtccatagcgattaggaagaaacagcaagaagtagtgggttttttggaagcgaataaaatcgactttaaggaattagatattgctggagatgaagacaacaggaggtggatgagagagaatgttcctggagagaaaaaacctcaaaatgggattcctttgcctccccagatcttcaatgaggagcagtactgtggggattttgactctttcttctctgcaaaagaagagaatattatttattccttccttggtttggctcctcctccagactcaaagggatcagagaaggctgaagaaggtggagaaactgaggcacaaaaagagggcagtgaagatgtgggcaacctccctgaagcccaggagaagaatgaagaagaaggagagacagccacagaagagacggaagaaatagccatggagggtgcggaaggggaagccgaggaggaggaagaaactgcagaaggagaagagcctggagaagacgaagattcctaggccttttcatgcttcatttcttccacttctccagaaaatggaagctatgaagcaacatttcaaatgtctctccacaaaccaaactcaacagaatactttggcttgaagccggcacacccagggttactgaggacttatgctgcctgacctggttagatgtacatggaggtatctcccgaatcatacaaaattaaatgtgaagaccgtttatgcataccttcatgtgcctgacagtcttggcttttgaagatttttttttcttttttgctctgcatagctagaccatcttattaataatactctgaaaaaaatgatttcaaggcatggaagttctctgtgatacaacaatagtatttcttcaaatgcgccttatgctacttatctcagaaacaggttttaaaatgaagtgctttccagagaaccatcatataaataaagattaatagaaaaataaaaaaaaaaaaaaaaaaaa

SEQ ID NO: 87 - protein, 239 aa, Homo sapiens
  ref <308>: DATABASE ACCESSION NUMBER: NCBI / NP_031367.1
  ref <309>: DATABASE ENTRY DATE: 2014-02-26
  ref <313>: RELEVANT RESIDUES IN SEQ ID NO: (1)..(239)
MPLLLLGETEPLKLERDCRSPVDPWAAASPDLALACLCHCQDLSSGAFPNRGVLGGVLFPTVEMVIKVFVATSSGSIAIRKKQQEVVGFLEANKIDFKELDIAGDEDNRRWMRENVPGEKKPQNGIPLPPQIFNEEQYCGDFDSFFSAKEENIIYSFLGLAPPPDSKGSEKAEEGGETEAQKEGSEDVGNLPEAQEKNEEEGETATEETEEIAMEGAEGEAEEEEETAEGEEPGEDEDS

SEQ ID NO: 88 - DNA, 859 bp, Homo sapiens
  ref <308>: DATABASE ACCESSION NUMBER: NCBI / NM_002925.3
  ref <309>: DATABASE ENTRY DATE: 2014-02-26
  ref <313>: RELEVANT RESIDUES IN SEQ ID NO: (1)..(859)
ggcgtctctgggaaggcagtggattgttggtctgcgtggaacttctcaggtggacaccagagcatggaacacatccacgacagcgatggcagttccagcagcagccaccagagcctcaagagcacagccaaatgggcggcatccctggagaatctgctggaagacccagaaggcgtgaaaagatttagggaatttttaaaaaaggaattcagtgaagaaaatgttttgttttggctagcatgtgaagattttaagaaaatgcaagataagacgcagatgcaggaaaaggcaaaggagatctacatgacctttctgtccagcaaggcctcatcacaggtcaacgtggaggggcagtctcggctcaacgagaagatcctggaagaaccgcaccctctgatgttccagaaactccaggaccagatctttaatctcatgaagtacgacagctacagccgcttcttaaagtctgacttgtttttaaaacacaagcgaaccgaggaagaggaagaagatttgcctgatgctcaaactgcagctaaaagagcttccagaatttataacacatgagcccccaaaaagccgggactggcagctttaagaagcaaaggaatttcctctcaggaccgtgccgggtttatcattgctttgttatttgtaaggactgaaatgtacaaaacccttcaatgggatgtgtgttttattaactgcttcaccagtaaattttgcatgatggctaagctaacataaaaaaagaataataataacttggaagttttagtttacaaaacagagattccttcaacactggacacgtcgagcattttgtagcttaattaaacctcatgtaaggccaaaaaaa

SEQ ID NO: 89 - protein, 167 aa, Homo sapiens
  ref <308>: DATABASE ACCESSION NUMBER: NCBI / NP_002916.1
  ref <309>: DATABASE ENTRY DATE: 2014-02-26
  ref <313>: RELEVANT RESIDUES IN SEQ ID NO: (1)..(167)
MEHIHDSDGSSSSSHQSLKSTAKWAASLENLLEDPEGVKRFREFLKKEFSEENVLFWLACEDFKKMQDKTQMQEKAKEIYMTFLSSKASSQVNVEGQSRLNEKILEEPHPLMFQKLQDQIFNLMKYDSYSRFLKSDLFLKHKRTEEEEEDLPDAQTAAKRASRIYNT

SEQ ID NO: 90 - DNA, 1039 bp, Homo sapiens
  ref <308>: DATABASE ACCESSION NUMBER: NCBI / NM_145040.2
  ref <309>: DATABASE ENTRY DATE: 2014-02-01
  ref <313>: RELEVANT RESIDUES IN SEQ ID NO: (1)..(1039)
gttgcaggcagacggagcagagcggtcagggatcatgagggagagtgcgttggagcgggggcctgtgcccgaggcgccggcggggggtcccgtgcacgccgtgacggtggtgaccctgctggagaagctggcctccatgctggagactctgcgggagcggcagggaggcctggctcgaaggcagggaggcctggcagggtccgtgcgccgcatccagagcggcctgggcgctctgagtcgcagccacgacaccaccagcaacaccttggcgcagctgctggccaaggcggagcgcgtgagctcgcacgccaacgccgcccaagagcgcgcggtgcgccgcgcagcccaggtgcagcggctggaggccaaccacgggctgctggtggcgcgcgggaagctccacgttctgctcttcaaggaggagggtgaagtcccagccagcgctttccagaaggcaccagagcccttgggcccggcggaccagtccgagctgggcccagagcagctggaggccgaagttggagagagctcggacgaggagccggtggagtccagggcccagcggctgcggcgcaccggattgcagaaggtacagagcctccgaagggccctttcgggccggaaaggccctgcagcgccaccgcccaccccggtcaagccgcctcgccttgggcctggccggagcgctgaagcccagccggaagcccagcctgcgctggagcccacgctggagccagagcctccgcaggacaccgaggaagatcccgggagacctggggctgccgaagaagctctgctccaaatggagagtgtagcctgagggctggtgttgcctgcctcccctgtgcttgtgccttgtcccaaaataaatcctttcagaatgtagcactcacgccctaataaggagcgaatcctacatccaccaaggcgggcgctctggccctcccttccttaagcccagtcctgtgtcctctgaaagaggtgcagtcactcacacctgcttgcgctcaccatcaataaaagtaatttcacccgaaaa

SEQ ID NO: 91 - protein, 261 aa, Homo sapiens
  ref <308>: DATABASE ACCESSION NUMBER: NCBI / NP_659477.2
  ref <309>: DATABASE ENTRY DATE: 2014-02-01
  ref <313>: RELEVANT RESIDUES IN SEQ ID NO: (1)..(261)
MRESALERGPVPEAPAGGPVHAVTVVTLLEKLASMLETLRERQGGLARRQGGLAGSVRRIQSGLGALSRSHDTTSNTLAQLLAKAERVSSHANAAQERAVRRAAQVQRLEANHGLLVARGKLHVLLFKEEGEVPASAFQKAPEPLGPADQSELGPEQLEAEVGESSDEEPVESRAQRLRRTGLQKVQSLRRALSGRKGPAAPPPTPVKPPRLGPGRSAEAQPEAQPALEPTLEPEPPQDTEEDPGRPGAAEEALLQMESVA

SEQ ID NO: 92 - DNA, 782 bp, Homo sapiens
  ref <308>: DATABASE ACCESSION NUMBER: NCBI / NM_004378.2
  ref <309>: DATABASE ENTRY DATE: 2014-02-02
  ref <313>: RELEVANT RESIDUES IN SEQ ID NO: (1)..(782)
aaggcgcgcagcgctgggcgcaaagcgccagtctccgccttgcgagctcagagtgtgcccgctgcgccgccgctgtccgtacctgccgccgccgccaccgccaccatgcccaacttcgccggcacctggaagatgcgcagcagcgagaatttcgacgagctgctcaaggcactgggtgtgaacgccatgctgaggaaagtggccgtagcggctgcgtccaagccgcacgtggagatccgccaggacggggatcagttctacatcaagacatccaccacggtgcgcaccactgagatcaacttcaaggtcggagaaggctttgaggaggagaccgtggacggacgcaagtgcaggagtttagccacttgggagaatgagaacaagatccactgcacgcaaactcttcttgaaggggacggccccaaaacctactggacccgtgagctggccaacgatgaacttatcctgacgtttggcgccgatgacgtggtctgcaccagaatttatgtccgagagtgaaggcagctggcttgctcctactttcaggaagggatgcaggctcccctgaggaatatgtcatagttctgagctgccagtggaccgcccttttcccctaccaatattaggtgatcccgttttccccatgacaatgttgtagtgtcccccacccccaccccccaggccttggtgcctcttgtatccctagtgctccatagtttggcatttgcacggtttcgaagtcattaaactggttagacgtgtctcaacctttaaaaaaaaaa

SEQ ID NO: 93 - protein, 137 aa, Homo sapiens
  ref <308>: DATABASE ACCESSION NUMBER: NCBI / NP_004369.1
  ref <309>: DATABASE ENTRY DATE: 2014-02-02
  ref <313>: RELEVANT RESIDUES IN SEQ ID NO: (1)..(137)
MPNFAGTWKMRSSENFDELLKALGVNAMLRKVAVAAASKPHVEIRQDGDQFYIKTSTTVRTTEINFKVGEGFEEETVDGRKCRSLATWENENKIHCTQTLLEGDGPKTYWTRELANDELILTFGADDVVCTRIYVRE

SEQ ID NO: 94 - DNA, 1477 bp, Homo sapiens
  ref <308>: DATABASE ACCESSION NUMBER: NCBI / NM_005525.3
  ref <309>: DATABASE ENTRY DATE: 2014-05-04
  ref <313>: RELEVANT RESIDUES IN SEQ ID NO: (1)..(1477)
gggaaattggctagcactgcctgagactactccagcctcccccgtccctgatgtcacaattcagaggctgctgcctgcttaggaggttgtagaaagctctgtaggttctctctgtgtgtcctacaggagtcttcaggccagctccctgtcggatggcttttatgaaaaaatatctcctccccattctggggctcttcatggcctactactactattctgcaaacgaggaattcagaccagagatgctccaaggaaagaaagtgattgtcacaggggccagcaaagggatcggaagagagatggcttatcatctggcgaagatgggagcccatgtggtggtgacagcgaggtcaaaagaaactctacagaaggtggtatcccactgcctggagcttggagcagcctcagcacactacattgctggcaccatggaagacatgaccttcgcagagcaatttgttgcccaagcaggaaagctcatgggaggactagacatgctcattctcaaccacatcaccaacacttctttgaatctttttcatgatgatattcaccatgtgcgcaaaagcatggaagtcaacttcctcagttacgtggtcctgactgtagctgccttgcccatgctgaagcagagcaatggaagcattgttgtcgtctcctctctggctgggaaagtggcttatccaatggttgctgcctattctgcaagcaagtttgctttggatgggttcttctcctccatcagaaaggaatattcagtgtccagggtcaatgtatcaatcactctctgtgttcttggcctcatagacacagaaacagccatgaaggcagtttctgggatagtccatatgcaagcagctccaaaggaggaatgtgccctggagatcatcaaagggggagctctgcgccaagaagaagtgtattatgacagctcactctggaccactcttctgatcagaaatccatgcaggaagatcctggaatttctctactcaacgagctataatatggacagattcataaacaagtaggaactccctgagggctgggcatgctgagggattttgggactgttctgtctcatgtttatctgagctcttatctatgaagacatcttcccagagtgtccccagagacatgcaagtcatgggtcacacctgacaaatggaaggagttcctctaacatttgcaaaatggaaatgtaataataatgaatgtcatgcaccgctgcagccagcagttgtaaaattgttagtaaacataggtataattaccagatagttatattaaatttatatcttatatataataatatgtgatgattaatacaatattaattataataaaggtcacataaactttataaattcataactggtagctataacttgagcttattcaggatggtttctttaaaaccataaactgtacaaatgaaatttttcaatatttgtttcttaaaaaaaaaaaaaaaaaa

SEQ ID NO: 95 - protein, 292 aa, Homo sapiens
  ref <308>: DATABASE ACCESSION NUMBER: NCBI / NP_005516.1
  ref <309>: DATABASE ENTRY DATE: 2014-05-04
  ref <313>: RELEVANT RESIDUES IN SEQ ID NO: (1)..(292)
MAFMKKYLLPILGLFMAYYYYSANEEFRPEMLQGKKVIVTGASKGIGREMAYHLAKMGAHVVVTARSKETLQKVVSHCLELGAASAHYIAGTMEDMTFAEQFVAQAGKLMGGLDMLILNHITNTSLNLFHDDIHHVRKSMEVNFLSYVVLTVAALPMLKQSNGSIVVVSSLAGKVAYPMVAAYSASKFALDGFFSSIRKEYSVSRVNVSITLCVLGLIDTETAMKAVSGIVHMQAAPKEECALEIIKGGALRQEEVYYDSSLWTTLLIRNPCRKILEFLYSTSYNMDRFINK

SEQ ID NO: 96 - DNA, 5734 bp, Homo sapiens
  ref <308>: DATABASE ACCESSION NUMBER: NCBI / NM_001201.2
  ref <309>: DATABASE ENTRY DATE: 2014-02-26
  ref <313>: RELEVANT RESIDUES IN SEQ ID NO: (1)..(5734)
agatcttgaaaacacccgggccacacacgccgcgacctacagctctttctcagcgttggagtggagacggcgcccgcagcgccctgcgcgggtgaggtccgcgcagctgctggggaagagcccacctgtcaggctgcgctgggtcagcgcagcaagtggggctggccgctatctcgctgcacccggccgcgtcccgggctccgtgcgccctcgccccagctggtttggagttcaaccctcggctccgccgccggctccttgcgccttcggagtgtcccgcagcgacgccgggagccgacgcgccgcgcgggtacctagccatggctggggcgagcaggctgctctttctgtggctgggctgcttctgcgtgagcctggcgcagggagagagaccgaagccacctttcccggagctccgcaaagctgtgccaggtgaccgcacggcaggtggtggcccggactccgagctgcagccgcaagacaaggtctctgaacacatgctgcggctctatgacaggtacagcacggtccaggcggcccggacaccgggctccctggagggaggctcgcagccctggcgccctcggctcctgcgcgaaggcaacacggttcgcagctttcgggcggcagcagcagaaactcttgaaagaaaaggactgtatatcttcaatctgacatcgctaaccaagtctgaaaacattttgtctgccacactgtatttctgtattggagagctaggaaacatcagcctgagttgtccagtgtctggaggatgctcccatcatgctcagaggaaacacattcagattgatctttctgcatggaccctcaaattcagcagaaaccaaagtcaactccttggccatctgtcagtggatatggccaaatctcatcgagatattatgtcctggctgtctaaagatatcactcaactcttgaggaaggccaaagaaaatgaagagttcctcataggatttaacattacgtccaagggacgccagctgccaaagaggaggttaccttttccagagccttatatcttggtatatgccaatgatgccgccatttctgagccagaaagtgtggtatcaagcttacagggacaccggaattttcccactggaactgttcccaaatgggatagccacatcagagctgccctttccattgagcggaggaagaagcgctctactggggtcttgctgcctctgcagaacaacgagcttcctggggcagaataccagtataaaaaggatgaggtgtgggaggagagaaagccttacaagacccttcaggctcaggcccctgaaaagagtaagaataaaaagaaacagagaaaggggcctcatcggaagagccagacgctccaatttgatgagcagaccctgaaaaaggcaaggagaaagcagtggattgaacctcggaattgcgccaggagatacctcaaggtagactttgcagatattggctggagtgaatggattatctcccccaagtcctttgatgcctattattgctctggagcatgccagttccccatgccaaagtctttgaagccatcaaatcatgctaccatccagagtatagtgagagctgtgggggtcgttcctgggattcctgagccttgctgtgtaccagaaaagatgtcctcactcagtattttattctttgatgaaaataagaatgtagtgcttaaagtataccctaacatgacagtagagtcttgcgcttgcagataacctggcaaagaactcatttgaatgcttaattcaatcattagtttatttttatggacttcttcctgttttttttttttttttttttgcactgccaatgcattttgtttcaaaagattatttctatagtcagaggggaatgagcaaatagactgaagattgccaccaaggaaaagaactgtatttgtttctgaatgtaacttaaagcaagatttttagtaaatatggacatctatttctctttttgtaatcaaacacaacaacttatcaaactgtttttagaactgttagagaacacactggtttatttttgtaatgttctttgaaaacagaatggagaagcagcaatagcttgtcatttatctcatttaatgactaatgggaaatagagaacaatttcgcgttttgaattaggcttattgccttagaatcctgagaaagtgctaaataatcaactctgatgtttttcttaagttcttgagactcttgtttatccttgtttttcctccacaagtcattgtctaagtgtaatggaaagtttatgctgagcgttagtgtgtatgtatgtgcgtacatgcgccaggtgcctgtgccctctgtaggatggtttgcttaatatggttttataattcagtttacacaggattctttattttttttaattttgtattttggcaaacaccattcagttataagaactttgccaaatatgatagaataattcaagagcatatacagagagttaccacttgacccagctatttaattgcaaatacagttgttttcatttcatttcctaccagaaaaaggaatcagaaacctagtttttgaaaacacaagtgtaattcctcttttgtacttctttttcacaaatgcttttatttattctaaattgaatttaaaaatccttcctaaagccattaactctttaattctcctgatatgcctttacttcctatgaagttattggtagatgttgaggcccaaaaactggtagaatattgaagatcttcttaaatgaccaatttaaccataaccaaatattgaatatcattcttcagtcacatctaagtcaggcactttttcacatagatcagggcttttggctcagtcacgaaatctacaagttagcaaagcttacaaaacattattcgtcaggtatgggaatcaaatatagacacttgtttgtctttgctttccatttctatgtgtcacatacatatatgtgtcctcttataactttagtcttcaaaattatttcaatatccttcttctcactatatttatttgtgtgatggaaatgctttcaggccgtagatcattgttggtgttaatctgtggttaatcctcattttagttccgtcttatctgatacttagaaatatctcagccattttggaggctgtgcagtatcagaagacgtggagtttgttctgtctctgcctgtagctaattatggtggttcagtcatttaataaatatgttttgagcatctattttgtgaaaggcactgtgttacctgtgtgtctttagtgtcctcactggtaaaatgaagaggctggccatgagctggaagggttaagtttataattccagctatttcacacccgtcttccttgaaggaatgatagtgatagatataaaaacactgtaagtccctcttttaataaactaaatgaaagaacatcctatacttcgctgtttgtaaattagtatggcattcgctttggtttaagtggtattttattgcaaacccattaaaagaataactcatgaaaagaagctctttgacaccttggggtacacaaatgttggtgtgggtgtgtgttaattctgtgagtgagacacaccagttctaaaaaaaatgagtgaagttctggtgcctgagttaccatgctttcttctagttcttacagtagcataaaattaaagattcaaagtgagatggaggataaaattactttttaatacatgttctcaaacatttgaaaataaaagtatatgatagaagggggccagagtgtggccaccatcctgatcgtactgtttttcaataaagaaaactttttcattggtagatttggtgaaattctaaatttaggtttttttctagagctgtatcaaccaaaacttctggcaattcccagtatcacttcttagccttcttatatccaaatgcctgtttattacctttcttaatttgaatcaatgcctagttattacagattgcaccccacaatggccaaaaacccactacataataaaatttacaggtactaactagttaagattatattttaagtagcaattgatataaaattacaacacaatgaaagaacttgggtaatctcttagcaatggaaataggttttaaccagcagtttttctgggtgctttgtaactatcattttactaatgaattgaggatgtattatggtttaaattggaagagttttattcccaaagaataaagcaagattatctttcagtagtagagattgaagtaaatgtattaatattttaattaatacagatttactaagagtagttagaaaatttagtaagtgcctgttttacaaattgttaggtactagtttctgtataattcctacacagaagctttagaaatctcctgatattaaattattaaattggcattcatgaaaagagaagctacaattataaactccatttgctaaatcatgcataatactctctctctctcttcccccacaagtaatctctctaccccatgcagtgtgcacacacacacacacacagtcagttactgaaaaaaataattctttttctttttttttttaaatggagtttcactcttgtcgcccaggctggagtgcagtggcgtgatctcggcccactgcaacctccacctcccaggttcaagcagttctcctgcctcagcctcctgagtagctgggattacaggtgtccgccaccatgcctggctaatttttttatttgataaaaagaattctttttctcaataactgttctcttgaattcaaattaagggactgccaaagtcaattagaatattttaaaaatactttgttgtaacctgtgtaaataatatacaatttacaggatttgggattgtagaacttaaactggaagactggattcctcagatctcaggactataacattccagataaatttttacattccctttgctgtatattaactgatgatcatttatatgttaagattttttaccttaatatttctgaataaaactcttattgcccatttaatattttcataggcaatcaaatgtgagtaatactgctaagagtctgatttattaaaaatatttgtataattcattcagtttagtttttcagtttagtctttctgctttcacttttctctgtgctaacaagtaactaatgtctgggcattgacttcttattgaatcaaagttgggttaggcatagctatgcacacctgatgtgtaagattaaagaagagattaaataagaaatcttgggtaagttggacttttctgtatagctcttttttcctctgagttgtattttaatgtagtttataagtgataaaatgatccttgttttctaaaagccagtccttcccttcagctttccacagtttctgtaaatgtttaatacttgtacagtcaatggcaattttaaatatatatatatatataatatatgtatatggaaaaggttcaaagatgcttttaatttatttaatgactattgccttcctataataataattttcatccttaattatgataatacttttagcaagaaaaattcctttttactacagtttttagatgcaaaatgcagtttggttctttagtcaaatccacttagagggtatattgcagtgaaactgtgaaggatacttcactaccaatgtataagctttgttgaatttgtatcattttctttcagtaatgaaaagctattcattatacagtatggaaataaaaattgcttcattga

SEQ ID NO: 97 - protein, 472 aa, Homo sapiens
  ref <308>: DATABASE ACCESSION NUMBER: NCBI / NP_001192.2
  ref <309>: DATABASE ENTRY DATE: 2014-02-26
  ref <313>: RELEVANT RESIDUES IN SEQ ID NO: (1)..(472)
MAGASRLLFLWLGCFCVSLAQGERPKPPFPELRKAVPGDRTAGGGPDSELQPQDKVSEHMLRLYDRYSTVQAARTPGSLEGGSQPWRPRLLREGNTVRSFRAAAAETLERKGLYIFNLTSLTKSENILSATLYFCIGELGNISLSCPVSGGCSHHAQRKHIQIDLSAWTLKFSRNQSQLLGHLSVDMAKSHRDIMSWLSKDITQLLRKAKENEEFLIGFNITSKGRQLPKRRLPFPEPYILVYANDAAISEPESVVSSLQGHRNFPTGTVPKWDSHIRAALSIERRKKRSTGVLLPLQNNELPGAEYQYKKDEVWEERKPYKTLQAQAPEKSKNKKKQRKGPHRKSQTLQFDEQTLKKARRKQWIEPRNCARRYLKVDFADIGWSEWIISPKSFDAYYCSGACQFPMPKSLKPSNHATIQSIVRAVGVVPGIPEPCCVPEKMSSLSILFFDENKNVVLKVYPNMTVESCACR

SEQ ID NO: 98 - DNA, 1784 bp, Homo sapiens
  ref <308>: DATABASE ACCESSION NUMBER: NCBI / NM_001099401.1
  ref <309>: DATABASE ENTRY DATE: 2014-05-24
  ref <313>: RELEVANT RESIDUES IN SEQ ID NO: (1)..(1784)
cgggattaccgagggggtgcgggatgctgatgctgaactggccaagctgggagggaagaagaaagggaggggaggggagaatcgaggacggacggcctagccaggccaagaatgcaattgccccggtggtgggagctgggagacccctgtgcttggacgggacagggtcgggggacacgcaggatgagccccgcgaccactggcacattcttgctgacagtgtacagtattttctccaaggtacactccgatcggaatgtatacccatcagcaggtgtcctctttgttcatgttttggaaagagaatattttaagggggaatttccaccttacccaaaacctggcgagattagtaatgatcccataacatttaatacaaatttaatgggttacccagaccgacctggatggcttcgatatatccaaaggacaccatatagtgatggagtcctatatgggtccccaacagctgaaaatgtggggaagccaacaatcattgagataactgcctacaacaggcgcacctttgagactgcaaggcataatttgataattaatataatgtctgcagaagacttcccgttgccatatcaagcagaattcttcattaagaatatgaatgtagaagaaatgttggccagtgaggttcttggagactttcttggcgcagtgaaaaatgtgtggcagccagagcgcctgaacgccataaacatcacatcggccctagacaggggtggcagggtgccacttcccattaatgacctgaaggagggcgtttatgtcatggttggtgcagatgtcccgttttcttcttgtttacgagaagttgaaaatccacagaatcaattgagatgtagtcaagaaatggagcctgtaataacatgtgataaaaaatttcgtactcaattttacattgactggtgcaaaatttcattggttgataaaacaaagcaagtgtccacctatcaggaagtgattcgtggagaggggattttacctgatggtggagaatacaaacccccttctgattctttgaaaagcagagactattacacggatttcctaattacactggctgtgccctcggcagtggcactggtcctttttctaatacttgcttatatcatgtgctgccgacgggaaggcgtggaaaagagaaacatgcaaacaccagacatccaactggtccatcacagtgctattcagaaatctaccaaggagcttcgagacatgtccaagaatagagagatagcatggcccctgtcaacgcttcctgtgttccaccctgtgactggggaaatcatacctcctttacacacagacaactatgatagcacaaacatgccattgatgcaaacgcagcaatggagtttcgctcctgttgcccaggctggagtgcaatggagcgatcttggctcactgcagcctccgcctcccaggaacttgccacatcagactcagattccccaacagcagactacaggtaaatggtatccctgaagaaagaaaactgactgaagcaatgaatttataatcagacaatatagcagttacatcacatttcttttctcttccaataatgcatgagcttttctggcatatgttatgcatgttggcagtattaagtgtataccaaataatacaacataactttcattttactaatgtatttttttgtacttaaagcatttttgacaatttgtaaaacattgatgactttatatttgttacaataaaagttgatctttaaaataaatattattaatgaagcctaaaaaaaaaaa

SEQ ID NO: 99 - protein, 462 aa, Homo sapiens
  ref <308>: DATABASE ACCESSION NUMBER: NCBI / NP_001092871.1
  ref <309>: DATABASE ENTRY DATE: 2014-05-24
  ref <313>: RELEVANT RESIDUES IN SEQ ID NO: (1)..(462)
MQLPRWWELGDPCAWTGQGRGTRRMSPATTGTFLLTVYSIFSKVHSDRNVYPSAGVLFVHVLEREYFKGEFPPYPKPGEISNDPITFNTNLMGYPDRPGWLRYIQRTPYSDGVLYGSPTAENVGKPTIIEITAYNRRTFETARHNLIINIMSAEDFPLPYQAEFFIKNMNVEEMLASEVLGDFLGAVKNVWQPERLNAINITSALDRGGRVPLPINDLKEGVYVMVGADVPFSSCLREVENPQNQLRCSQEMEPVITCDKKFRTQFYIDWCKISLVDKTKQVSTYQEVIRGEGILPDGGEYKPPSDSLKSRDYYTDFLITLAVPSAVALVLFLILAYIMCCRREGVEKRNMQTPDIQLVHHSAIQKSTKELRDMSKNREIAWPLSTLPVFHPVTGEIIPPLHTDNYDSTNMPLMQTQQWSFAPVAQAGVQWSDLGSLQPPPPRNLPHQTQIPQQQTTGKWYP

SEQ ID NO: 100 - DNA, 3150 bp, Homo sapiens
  ref <308>: DATABASE ACCESSION NUMBER: NCBI / NM_022138.2
  ref <309>: DATABASE ENTRY DATE: 2014-05-10
  ref <313>: RELEVANT RESIDUES IN SEQ ID NO: (1)..(3150)
gggtatttgacaggagcgagggcggacgcaaagaacgcggaggacctctgggtgcctgcaggggagctgctccagccgggccgccgggagcggtggggagagcatcgcggagccgcccctccacgcgcccgcccagccgcgctcgcccactgggctctcccggctgcagtgccagggcgcaggacgcggccgatctcccgctcccgccacctccgccaccatgctgctcccccagctctgctggctgccgctgctcgctgggctgctcccgccggtgcccgctcagaagttctcggcgctcacgtttttgagagtggatcaagataaagacaaggattgtagcttggactgtgcgggttcgccccagaaacctctctgcgcatctgacggaaggaccttcctttcccgttgtgaatttcaacgtgccaagtgcaaagatccccagctagagattgcatatcgaggaaactgcaaagacgtgtccaggtgtgtggccgaaaggaagtatacccaggagcaagcccggaaggagtttcagcaagtgttcattcctgagtgcaatgacgacggcacctacagtcaggtccagtgtcacagctacacgggatactgctggtgcgtcacgcccaacgggaggcccatcagcggcactgccgtggcccacaagacgccccggtgcccgggttccgtaaatgaaaagttaccccaacgcgaaggcacaggaaaaacagtctccttgcaaatcttttccgttctgaattcagatgatgccgcagctccagcgttggagactcagcctcaaggagatgaagaagatattgcatcacgttaccctaccctttggactgaacaggttaaaagtcggcagaacaaaaccaataagaattcagtgtcatcctgtgaccaagagcaccagtctgccctggaggaagccaagcagcccaagaacgacaatgtggtgatccctgagtgtgcgcacggcggcctctacaagccagtgcagtgccacccctccacggggtactgctggtgcgtcctggtggacacggggcgccccattcccggcacatccacaaggtacgagcagccgaaatgtgacaacacggccagggcccacccagccaaagcccgggacctgtacaagggccgccagctacaaggttgtccgggtgccaaaaagcatgagtttctgaccagcgttctggacgcgctgtccacggacatggtccacgccgcctccgacccctcctcctcgtcaggcaggctctcagaacccgaccccagccataccctagaggagcgggtggtgcactggtacttcaaactactggataaaaactccagtggagacatcggcaaaaaggaaatcaaacccttcaagaggttccttcgcaaaaaatcaaagcccaaaaaatgtgtgaagaagtttgttgaatactgtgacgtgaataatgacaaatccatctccgtacaagaactgatgggctgcctgggcgtggcgaaagaggacggcaaagcggacaccaagaaacgccacacccccagaggtcatgctgaaagtacgtctaatagacagccaaggaaacaaggataaatggctcataccccgaaggcagttcctagacacatgggaaatttccctcaccaaagagcaattaagaaaacaaaaacagaaacacatagtatttgcactttgtactttaaatgtaaattcactttgtagaaatgagctatttaaacagactgttttaatctgtgaaaatggagagctggcttcagaaaattaatcacatacaatgtatgtgtcctcttttgaccttggaaatctgtatgtggtggagaagtatttgaatgcatttaggcttaatttcttcgccttccacatgttaacagtagagctctatgcactccggctgcaatcgtatggctttctctaacccctgcagtcacttccagatgcctgtgcttacagcattgtggaatcatgttggaagctccacatgtccatggaagtttgtgatgtacggccgaccctacaggcagttaacatgcatgggctggtttgtttcttgggattttctgttagtttgtcttgttttgctttccagagatcttgctcatacaatgaatcacgcaaccactaaagctatccagttaagtgcaggtagttcccctggaggaaataatattttcaaactgtcgttggtgtgatactttggctcaaaggatctttgcttttccattttaagcttctgttttgagttttgccctggggcttgaatgagtcccagagagtcgttcggatggtgggaggctgcctaggaggcagtaaatccagtcacagtgcctgggaggggcccatccttccaaaatgtaaatccagtcgcggtgtgaccgagctggctaacaggcttgtctgcctggttttcctcctacacgtggacattattctcctgatcctcctacctggtccaccccagggctaccggaaggtaaaatcttcacctgaaccaattatgagcagtctccttactgaaggtacagccggatacgtggtgcccccggggctggtgttggcagccggggggaggtgcctgagggtccccacggttcctttctgcttttctgaatgcatcaagggtacgagaacttgccaatgggaaattcatccgagtggcactggcagagaaggataggagtggaatgcccacacagtgaccaacagaactggtctgcgtgcataaccagctgccaccctcaggcctgggccccagagctcagggcacccagtgtcttaaggaaccatttggaggacagtctgagagcaggaacttcaagctgtgattctatctcggctcagacttttggttggaaaaagatcttcatggccccaaatcccctgagacatgccttgtagaatgattttgtgatgttgtgatgcttgtggagcatcgcgtaaggcttcttgcttatttaaactgtgcaaggtaaaaatcaagcctttggagccacagaaccagctcaagtacatgccaatgttgtttaagaaacagttatgatcctaaactttttggataatcttttatatttctgacctttgaatttaatcattgttcttagattaaaataaaatatgctattgaaactata

SEQ ID NO: 101 - protein, 457 aa, Homo sapiens
  ref <308>: DATABASE ACCESSION NUMBER: NCBI / NP_071421.1
  ref <309>: DATABASE ENTRY DATE: 2014-05-10
  ref <313>: RELEVANT RESIDUES IN SEQ ID NO: (1)..(457)
MLLPQLCWLPLLAGLLPPVPAQKFSALTFLRVDQDKDKDCSLDCAGSPQKPLCASDGRTFLSRCEFQRAKCKDPQLEIAYRGNCKDVSRCVAERKYTQEQARKEFQQVFIPECNDDGTYSQVQCHSYTGYCWCVTPNGRPISGTAVAHKTPRCPGSVNEKLPQREGTGKTVSLQIFSVLNSDDAAAPALETQPQGDEEDIASRYPTLWTEQVKSRQNKTNKNSVSSCDQEHQSALEEAKQPKNDNVVIPECAHGGLYKPVQCHPSTGYCWCVLVDTGRPIPGTSTRYEQPKCDNTARAHPAKARDLYKGRQLQGCPGAKKHEFLTSVLDALSTDMVHAASDPSSSSGRLSEPDPSHTLEERVVHWYFKLLDKNSSGDIGKKEIKPFKRFLRKKSKPKKCVKKFVEYCDVNNDKSISVQELMGCLGVAKEDGKADTKKRHTPRGHAESTSNRQPRKQG

SEQ ID NO: 102 - DNA, 9682 bp, Homo sapiens
  ref <308>: DATABASE ACCESSION NUMBER: NCBI / NM_005504.6
  ref <309>: DATABASE ENTRY DATE: 2014-05-10
  ref <313>: RELEVANT RESIDUES IN SEQ ID NO: (1)..(9682)
agtagggaggtgggcaggagccagtgatgacggaatggcaatcacatttgacctctgatctgtttatttcctcctccttgacgtctccatataaatgttacacgggcatccccacactcggatacgcacccacagtggctgattcgggggtaaccgtgtcatttgcttgcaacactggcacctctgccctgcaccccgggagtgagcagtgagtgaggctcgggtctgggcgctggctccgaatcttcgggctgggagagactccaccatctgggggcggcctgggggagcagccttagtgtcttcctgctgatgcaatccgctaggtcgcgagtctccgccgcgagagggccggtctgcaatccagcccgccacgtgtactcgccgccgcctcgggcactgccccaggtcttgctgcagccgggaccgcgctctgcagccgcagacccggtccacacggccaggggctacgacccttgggatctgccctccgctcagctcgagcttccctcgtggccgacggaacaatgaaggattgcagtaacggatgctccgcagagtgtaccggagaaggaggatcaaaagaggtggtggggacttttaaggctaaagacctaatagtcacaccagctaccattttaaaggaaaaaccagaccccaataatctggtttttggaactgtgttcacggatcatatgctgacggtggagtggtcctcagagtttggatgggagaaacctcatatcaagcctcttcagaacctgtcattgcaccctggctcatcagctttgcactatgcagtggaattatttgaaggattgaaggcatttcgaggagtagataataaaattcgactgtttcagccaaacctcaacatggatagaatgtatcgctctgctgtgagggcaactctgccggtatttgacaaagaagagctcttagagtgtattcaacagcttgtgaaattggatcaagaatgggtcccatattcaacatctgctagtctgtatattcgtcctacattcattggaactgagccttctcttggagtcaagaagcctaccaaagccctgctctttgtactcttgagcccagtgggaccttatttttcaagtggaacctttaatccagtgtccctgtgggccaatcccaagtatgtaagagcctggaaaggtggaactggggactgcaagatgggagggaattacggctcatctctttttgcccaatgtgaagcagtagataatgggtgtcagcaggtcctgtggctctatggagaggaccatcagatcactgaagtgggaactatgaatctttttctttactggataaatgaagatggagaagaagaactggcaactcctccactagatggcatcattcttccaggagtgacaaggcggtgcattctggacctggcacatcagtggggtgaatttaaggtgtcagagagatacctcaccatggatgacttgacaacagccctggaggggaacagagtgagagagatgtttggctctggtacagcctgtgttgtttgcccagtttctgatatactgtacaaaggcgagacaatacacattccaactatggagaatggtcctaagctggcaagccgcatcttgagcaaattaactgatatccagtatggaagagaagagagcgactggacaattgtgctatcctgaatggaaaatagaggatacaatggaaaatagaggataccaactgtatgctactgggacagactgttgcatttgaattgtgatagatttctttggctacctgtgcataatgtagtttgtagtatcaatgtgttacaagagtgattgtttcttcatgccagagaaaatgaattgcaatcatcaaatggtgtttcataacttggtagtagtaacttaccttaccttacctagaaaaacattaatgtaagccatataacatgggattttcctcaatgattttagtgcctccttttgtacttcactcagatactaaatagtagtttattctttaatataagttacattctgctcctcaaacaaatgcaattttttgtgtgtgtttgaaagctaatttgagaaaatttcataggttacatttcctgcagcctatctttatccacagaaagtgttttcttttttttaaatcaagacttttaaaactggatttcctcccatcactgttttttgaaggtcctccaagtccgtgttaaggtaaatatctgttttcttcctgatgtcacagcctgagcatactctgtgcattaggaagacctgagtgcatttcccaccattgtcctttccacattatgttgtagctggctggctgtcaggcgactacaagactgagggtcttgtgccttatagatctttgtatcccccatggctgacatatagtaggtactcagtaaatggttttataatgaatcagtgaacattttgcttctatagaagtgtaccttctttgtttctatattatgaaacctctttattagaatttgtgattgattctgacagtgtatagatttaccttatattgtctttattttccatgagctactaagtcattagagatactctgaagcatagttagtttaggaaatcacttcatattgattgtattagaattatcttggaattgaagatatatccctagagcaggggaccccaacccccaggccatgggccacacagcaggaagaggtgagtggtgggccattgaggagcttcatctgtatttatggctacttcccatcactcgaattaccacctgaactccacctcttgtcagctcagtggcagcattagattctcataggagcacaaatcctattgtgaactctgcatgcaagggatctaggctatgcgctccttatgagaatctaatgcttgatgacctgaggtgtaacagtttcatcctgaaaccacccttcaccctgcagtctgtggaaaaattgtcttccacaaaactggtccctggtgccaaaaatgttggggaccactgctctagagagaggtcatgatatcataccaaccaaatggaaatgacaaatgttttatgtcaagtgttaattgcagaaataaatcttttttttttttttttggtagaaaacaaagaggcatactctgatttttatactctgtttttgcaggtgctcttttctttgaatggagatttgatgagcaagtggttaggatgcagggagagctactatgggtgatattttccttgtttaggagctgtgagttaaaattgtatcctttgtggtttatctaaggaaagtcaaatcttgacagaaaacatttttccttggaaggtcaactctcagacattgtattttggtttccctcagtcctcataacttccttcttgctgaacatattttattctcttttcagagaaggaaaataaaaaggattctaaaagtttgatgcattggaaaaatttccttgaggcatttagcaacacatagaaaatgggctttgattcttttccaaaacttttagccatagggtcttttatagacagggatagtaaaatgaaaattgagaaatataagatgaaaaggaatgataaaaatatcttttagggggcttttaattggtgatctgaaatcttgggagaagctgttcttttcaggcctgaggtgctcttgactgtcgcctgcgcactgtgtaccccgagcaacattctaagggtgtgctttcgccttggctaactcctttgacctcattcttcatatagtagtctaggaaaaagttgcaggtaatttaaactgtctagtggtacatagtaactaaatttctattcctatgagaaatgagaattatttatttgccatcaacacattttatactttgcatctccaaatttattgtggcgagacttgtccattgtgaaagttagagaacattatgtttgtatcatttctttcataaaacctcaagagcatttttaagcccttttcatcagacccagtgaaaactaaggatagatgtttaaaaactggaggtctcctgataaggagaacacaatccaccattgtcatttaagtaataagacaggaaattgaccttgacgctttcttgttaaatagatttaacaggaacatctgcacatcttttttccttgtgcactatttgtttaattgcagtggattaatacagcaagagtgccacattataactaggcaattatccattcttcaagacttagttattgtcacactaattgatcgtttaaggcataagatggtctagcattaggaacatgtgaagctaatctgctcaaaaagatcaacaaattaatattgttgctgatatttgcataattggctgcaattatttaatgtttaattgggttgatcaaatgagattcagcaattcacaagtgcattaatataaacagaactggtggcacttaaaatgataatgattaacttatattgcatgttctcttcctttcacttttttcagtttctacatttcagaccgagcttgtcagcttttttgaaaacacatcagtagaaaccaagattttaaaatgaagtgtcaagacaaaggcaaaacctgagcagttcctaaaaagatttgctgttagaaattttctttgtggcagtcatttattaaggattcaactcgtgatacaccaaaagaagagttgacttcagagatgtgttccatgctctctagcacaggaatgaataaatttataacacctgctttagcctttgttttcaaaagcacaaaggaaaagtgaaagggaaagagaaacaagtgactgagaagtcttgttaaggaatcaggttttttctacctggtaaacattctctattcttttctcaaaagattgctgtaagaaaaaatgtaagacaaaaaaaaaaaaaaaaaacaaacagaggcagaggcaggcagtagcaagaaagcagagcgtaacatcagctagatggtaacatgcaatgtcagctctcttgaagacatgggaaacctaagttacaccttgggttaaaattcttcaccatattagttttgttgcttcataaaatttacctaagcaagtggtcttgcttgcctcaaatccaagcagtcttgaacacttggaggcaattaatgagtatatcttagtcaaaagaattgttggagctttttattaaagctacagtttcagttctgcttttggggaattgtgctatgaaagcagctgccaaaataagctcatttattttcttcaatcccactcagtgctcagtcactatattctgtttcctttttttttttcaagttgcatatttggtttccccttatgattgggaaagatgaattttcagcagaaaacattgtttgttcactttcaaagagtgatagtttctaaaacatttagagcaataaatattcatcagaggtaccaagtaagccggcagaagagttaagggttagagaaatcccttatttcatgtcttgactctaaaattatcaaagtacttttccttgtaatgtggatttcttcttatgcggatatgcaaaaacttcagttatacgtagtaatgctagcaggtaattttagtagacattttataacaactgtcactttgtttcgccacatgtagagtttgttcagctattttccagatatctccccacaaaaggaggcaaagggtaccagcttttcaatgagcattacctattacttggcaaagatgatgaagactctattaatagttcatttgataaatgttgacataaccaacaatagagattaggaagttagttttaagaaatcaatggcatatagacattaccctcatggagtttgtattctactacttgaactgattgtagctataaaagcatagttagatagctgaatagttagatcataagcaaagaaggccagaacacatctcttatcaagaaatcaatgaatagtttatctcatttttaaagcaactttatccttctttaattccttcctttcttctagtgcaaaactacttaataaggttggtgtttaggttagtgttcacaccattcctcatctggtgtgaattaccttctctttctttactatttactaccaacctagtacatgtgttgactgaattcttttcaaacaatgttgagttatcatggtgcacctaataaattaacaccacagattacagcatccttgctgattttctcagcaaagccagattagatggaaataaacaaagaaaatgatcctagagtgaatttttctagaaaatatctattatgaaccatgctgtttaaagtattagcttgaaggtgatggatccagctattcagaaaataactttcatataaccatgattttgcacagtatgaggtcttaaatgtgtggaaagagataaattttttatcattaccacaaaccccttttaaagattcaaaggtggaagaaagtgatttattttttctcttcagcatacatatataaaagacttgtcagatgtttaatttggggaggttgataatgaaacatatcaacagagtatagtagttatagtagtgtttgtgggtaaataatttcctggggtcagacatatataaacatatttgcttcaaaatgataaaggcatgaaatcagtcttaaaaattgaaatgggggtgatgggggagaaaaagaagaacaaatttgaagtgccctttcaaatctgctggatacaagtattgaagttttaagtcatcttattctgtctgaaagtgtatttttcattctacaatagacccaatcaacaagacgtataacttgagttgcatgatgttcagtttatgtaatctactgttgggatggtaagaattgatgtaggctgtggtgtaagaatgaattaaaatatagtttcactggcttttctctacatatccactatcacaatggctaggtttcctgttgctcactattggattctggagaaaaatttaatgaaagatgatatcagaggaagaataagtggaggtagagaagaaaggaatgatagaggaggggaaaaaaacaaaacatatttttgtgttatccaaaggagctttttccttattctgtcaagcattgagatcttcttcagctttcaatgtagttgctaaatacaaataatgctactaggtagtgactaaatatagcaaacacttcatcagatattagaattaggtcacactattgaggttataatctgaaggttgtgttacatagaaaccactttagattattatcaacttggactaggctttattttataatagcatagtaagtaatatctattgtgtcatttcttcaaccattttattctaagatccatgaagcttcttgaggccaaataaaataataagtttagacaagaagtagattgtgacttttttcccttagagatactatttactatctcctatcctgataggtggaaggtttactgaattggaaattggttgactattagtttttaactaaaatgtgcaataacacattgcagtttcctcaaactagtttcctatgatcattaaactcattctcagggttaagaaaggaatgtaaatttctgcctcaatttgtacttcatcaataagtttttgaagagtgcagatttttagtcaggtcttaaaaataaactcacaaatctggatgcatttctaaattctgcaaatgtttcctggggtgacttaacaaggaataatcccacaatatacctagctacctaatacatggagctggggctcaacccactgtttttaaggatttgcgcttacttgtggctgaggaaaaataagtagttcgaggaagtagtttttaaatgtgagcttatagatagaaacagaatatcaacttaattatgaaattgttagaacctgttctcttgtatctgaatctgattgcaattactattgtactgatagactccagccattgcaagtctcagatatcttagctgtgtagtgattcttgaaattctttttaagaaaaattgagtagaaagaaataaaccctttgtaaatgaggcttggcttttgtgaaagatcatccgcaggctatgttaaaaggattttagctcactaaaagtgtaataatggaaatgtggaaaatatcgtaggtaaaggaaactacctcatgctctgaaggttttgtagaagcacaattaaacatctaaaatggctttgttacaccagagccatctggtgtgaagaactctatatttgtatgttgagagggcatggaataattgtattttgctggcaatagacacattctttattatttgcagattcctcatcaaatctgtaattatgcacagtttctgttatcaataaaacaaaagaatcctgtttgtgtggtttcatgaaatcagcattgttgaatgcatgaagtaataatgctaaattaacatttttatgatgtctcaaggtttctggtcaagggaagtaaatgtaggatagtatttttacaccaaaatgacacagagagaattgagcacaccagaaagaccagaaaccacaccactggatagagattcaatatgtttctttttcaaacatttggacaagaaaaaaatgggcatttaaaaattcttccttcccctggttatggatttatctgtagtaaaacttagctttgtcgtttgagatttgcacagaatggggggagtagattacctcttcccattcattgtcataatggatctacatcactgataaacaccatacttctatatgtggttaactagctttagaataaaagacactttaaaaagtaaaaggcctagagatcttcaatgaagtgtcccttttagccaaaccaggccttgcagaaattgtcctcaaaagcaccaagggagaacaaagccaagtgcagaattacccaagggtcacacattttgtattcattttcttataatttgcccaaatgatttgaagtacagcaaaacctgaagttttgcaaagagttactgtaaactgaacttaaaaatgtcagagtgctcggtgacccacttctccagaccctgtcaacctgtgaaaatattggcctttattcagatctctcaagaagttacgcgcagagtttggaaggtctaggcaaaggttattagtcaagtgttcttacagtgtcaacgctcaattcccacaagcgtgagaaagagagacctgtcattcctgagggtgatgacatacatttactggagcttatataatttatcagataagacagcagtttccttcagggtagaaagtgtgttttctacattgatttagtacaaaacaaaaagaaaaggggatatttcaaattttataattatttttctgctaagctgattcagtgtgatttaagcatatttttcaaatcatgaatctgattccatatacatatgtgccttatattgtgataatttatttttaagtgaaatatgctatcatagcctgactttatgtatagtggtgacaacttgcaggatcgcatttctgtaaccaaacggccgacagctgaggtgtagatgcttcctatggtctgtagaataatcactgggcttgttctctagctatgtctgtatgcaatcgcgacagtgttgatcaaaacccatgatcattctctccaaaggtctttgtcactaagccactagggattctgaaaagttcgtgagctgaaacaaataaattgagttggaagattaaaaaaaaaa

SEQ ID NO: 103 - protein, 386 aa, Homo sapiens
  ref <308>: DATABASE ACCESSION NUMBER: NCBI / NP_005495.2
  ref <309>: DATABASE ENTRY DATE: 2014-05-10
  ref <313>: RELEVANT RESIDUES IN SEQ ID NO: (1)..(386)
MKDCSNGCSAECTGEGGSKEVVGTFKAKDLIVTPATILKEKPDPNNLVFGTVFTDHMLTVEWSSEFGWEKPHIKPLQNLSLHPGSSALHYAVELFEGLKAFRGVDNKIRLFQPNLNMDRMYRSAVRATLPVFDKEELLECIQQLVKLDQEWVPYSTSASLYIRPTFIGTEPSLGVKKPTKALLFVLLSPVGPYFSSGTFNPVSLWANPKYVRAWKGGTGDCKMGGNYGSSLFAQCEAVDNGCQQVLWLYGEDHQITEVGTMNLFLYWINEDGEEELATPPLDGIILPGVTRRCILDLAHQWGEFKVSERYLTMDDLTTALEGNRVREMFGSGTACVVCPVSDILYKGETIHIPTMENGPKLASRILSKLTDIQYGREESDWTIVLS

SEQ ID NO: 104 - DNA, 3646 bp, Homo sapiens
  ref <308>: DATABASE ACCESSION NUMBER: NCBI / NM_003383.3
  ref <309>: DATABASE ENTRY DATE: 2014-05-10
  ref <313>: RELEVANT RESIDUES IN SEQ ID NO: (1)..(3646)
ctctccggccgccgccggtgcgggtgctccgctaccggctcctctccgttctgtgctctcttctgctctcggctccccaccccctctcccttccctcctctccccttgcctcccctcctctgcagcgcctgcattattttctgcccgcaggctcggcttgcactgctgctgcagcccggggaggtggctgggtgggtggggaggagactgtgcaagttgtaggggagggggtgccctcttcttccccgctcccttcccccgccaactccttcccctccttctccccctttcccctccccgcccccaccttcttcctcctttcggaaggactggtaacttgtcgtgcggagcgaacggcggcggcggcggcggcggcggcaccatccaggcgggcaccatgggcacgtccgcgctctgggcgctctggctgctgctcgcgctgtgctgggcgccccgggagagcggcgccaccggaaccgggagaaaagccaaatgtgaaccctcccaattccagtgcacaaatggtcgctgtattacgctgttgtggaaatgtgatggggatgaagactgtgttgacggcagtgatgaaaagaactgtgtaaagaagacgtgtgctgaatctgacttcgtgtgcaacaatggccagtgtgttcccagccgatggaagtgtgatggagatcctgactgcgaagatggttcagatgaaagcccagaacagtgccatatgagaacatgccgcatacatgaaatcagctgtggcgcccattctactcagtgtatcccagtgtcctggagatgtgatggtgaaaatgattgtgacagtggagaagatgaagaaaactgtggcaatataacatgtagtcccgacgagttcacctgctccagtggccgctgcatctccaggaactttgtatgcaatggccaggatgactgcagcgatggcagtgatgagctggactgtgccccgccaacctgtggcgcccatgagttccagtgcagcacctcctcctgcatccccatcagctgggtatgcgacgatgatgcagactgctccgaccaatctgatgagtccctggagcagtgtggccgtcagccagtcatacacaccaagtgtccagccagcgaaatccagtgcggctctggcgagtgcatccataagaagtggcgatgtgatggggaccctgactgcaaggatggcagtgatgaggtcaactgtccctctcgaacttgccgacctgaccaatttgaatgtgaggatggcagctgcatccatggcagcaggcagtgtaatggtatccgagactgtgtcgatggttccgatgaagtcaactgcaaaaatgtcaatcagtgcttgggccctggaaaattcaagtgcagaagtggagaatgcatagatatcagcaaagtatgtaaccaggagcaggactgcagggactggagtgatgagcccctgaaagagtgtcatataaacgaatgcttggtaaataatggtggatgttctcatatctgcaaagacctagttataggctacgagtgtgactgtgcagctgggtttgaactgatagataggaaaacctgtggagatattgatgaatgccaaaatccaggaatctgcagtcaaatttgtatcaacttaaaaggcggttacaagtgtgaatgtagtcgtggctatcaaatggatcttgctactggcgtgtgcaaggcagtaggcaaagagccaagtctgatcttcactaatcgaagagacatcaggaagattggcttagagaggaaagaatatatccaactagttgaacagctaagaaacactgtggctctcgatgctgacattgctgcccagaaactattctgggccgatctaagccaaaaggctatcttcagtgcctcaattgatgacaaggttggtagacatgttaaaatgatcgacaatgtctataatcctgcagccattgctgttgattgggtgtacaagaccatctactggactgatgcggcttctaagactatttcagtagctaccctagatggaaccaagaggaagttcctgtttaactctgacttgcgagagcctgcctccatagctgtggacccactgtctggctttgtttactggtcagactggggtgaaccagctaaaatagaaaaagcaggaatgaatggattcgatagacgtccactggtgacagcggatatccagtggcctaacggaattacacttgaccttataaaaagtcgcctctattggcttgattctaagttgcacatgttatccagcgtggacttgaatggccaagatcgtaggatagtactaaagtctctggagttcctagctcatcctcttgcactaacaatatttgaggatcgtgtctactggatagatggggaaaatgaagcagtctatggtgccaataaattcactggatcagagctagccactctagtcaacaacctgaatgatgcccaagacatcattgtctatcatgaacttgtacagccatcaggtaaaaattggtgtgaagaagacatggagaatggaggatgtgaatacctatgcctgccagcaccacagattaatgatcactctccaaaatatacctgttcctgtcccagtgggtacaatgtagaggaaaatggccgagactgtcaaagtactgcaactactgtgacttacagtgagacaaaagatacgaacacaacagaaatttcagcaactagtggactagttcctggagggatcaatgtgaccacagcagtatcagaggtcagtgttcccccaaaagggacttctgccgcatgggccattcttcctctcttgctcttagtgatggcagcagtaggtggctacttgatgtggcggaattggcaacacaagaacatgaaaagcatgaactttgacaatcctgtgtacttgaaaaccactgaagaggacctctccatagacattggtagacacagtgcttctgttggacacacgtacccagcaatatcagttgtaagcacagatgatgatctagcttgacttctgtgacaaatgttgacctttgaggtctaaacaaataatacccccgtcggaatggtaaccgagccagcagctgaagtctctttttcttcctctcggctggaagaacatcaagatacctttgcgtggatcaagcttgtgtacttgaccgtttttatattacttttgtaaatattcttgtccacattctacttcagctttggatgtggttaccgagtatctgtaacccttgaatttctagacagtattgccacctctggccaaatatgcactttccctagaaagccatattccagcagtgaaacttgtgctatagtgtataccacctgtacatacattgtataggccatctgtaaatatcccagagaacaatcactattcttaagcactttgaaaatatttctatgtaaattattgtaaactttttcaatggttgggacaatggcaataggacaaaacgggttactaagatgaaattgccaaaaaaatttataaactaattttgtacgtatgaatgatatctttgacctcaatggaggtttgcaaagactgagtgttcaaactactgtacattttttttcaagtgctaaaaaattaaaccaagcagcttaaccatgaaaaaaaaaa

SEQ ID NO: 105 - protein, 873 aa, Homo sapiens
  ref <308>: DATABASE ACCESSION NUMBER: NCBI / NP_003374.3
  ref <309>: DATABASE ENTRY DATE: 2014-05-10
  ref <313>: RELEVANT RESIDUES IN SEQ ID NO: (1)..(873)
MGTSALWALWLLLALCWAPRESGATGTGRKAKCEPSQFQCTNGRCITLLWKCDGDEDCVDGSDEKNCVKKTCAESDFVCNNGQCVPSRWKCDGDPDCEDGSDESPEQCHMRTCRIHEISCGAHSTQCIPVSWRCDGENDCDSGEDEENCGNITCSPDEFTCSSGRCISRNFVCNGQDDCSDGSDELDCAPPTCGAHEFQCSTSSCIPISWVCDDDADCSDQSDESLEQCGRQPVIHTKCPASEIQCGSGECIHKKWRCDGDPDCKDGSDEVNCPSRTCRPDQFECEDGSCIHGSRQCNGIRDCVDGSDEVNCKNVNQCLGPGKFKCRSGECIDISKVCNQEQDCRDWSDEPLKECHINECLVNNGGCSHICKDLVIGYECDCAAGFELIDRKTCGDIDECQNPGICSQICINLKGGYKCECSRGYQMDLATGVCKAVGKEPSLIFTNRRDIRKIGLERKEYIQLVEQLRNTVALDADIAAQKLFWADLSQKAIFSASIDDKVGRHVKMIDNVYNPAAIAVDWVYKTIYWTDAASKTISVATLDGTKRKFLFNSDLREPASIAVDPLSGFVYWSDWGEPAKIEKAGMNGFDRRPLVTADIQWPNGITLDLIKSRLYWLDSKLHMLSSVDLNGQDRRIVLKSLEFLAHPLALTIFEDRVYWIDGENEAVYGANKFTGSELATLVNNLNDAQDIIVYHELVQPSGKNWCEEDMENGGCEYLCLPAPQINDHSPKYTCSCPSGYNVEENGRDCQSTATTVTYSETKDTNTTEISATSGLVPGGINVTTAVSEVSVPPKGTSAAWAILPLLLLVMAAVGGYLMWRNWQHKNMKSMNFDNPVYLKTTEEDLSIDIGRHSASVGHTYPAISVVSTDDDLA

SEQ ID NO: 106 - DNA, 3868 bp, Homo sapiens
  ref <308>: DATABASE ACCESSION NUMBER: NCBI / NM_022912.2
  ref <309>: DATABASE ENTRY DATE: 2014-05-03
  ref <313>: RELEVANT RESIDUES IN SEQ ID NO: (1)..(3868)
aacgccgggcagggcggcgggcgcgctcagtctggcggcggctgccgtgagctgactgacgttccgggaacgccgcagcagcccgcgccgcccgcagcctagccgagccgcgccgcccgggcctcgcccgcccgcctgcccgccatggtgtcatggatcatctccaggctggtggtgcttatatttggcaccctttaccctgcgtattattcctacaaggctgtgaaatcaaaggacattaaggaatatgtcaaatggatgatgtactggattatatttgcacttttcaccacagcagagacattcacagacatcttcctttgttggtttccattctattatgaactaaaaatagcatttgtagcctggctgctgtctccctacacaaaaggctccagcctcctgtacaggaagtttgtacatcccacgctatcttcaaaagaaaaggaaatcgatgattgtctggtccaagcaaaagaccgaagttacgatgcccttgtgcacttcgggaagcggggcttgaacgtggccgccacagcggctgtgatggctgcttccaagggacagggtgccttatcggagagactgcggagcttcagcatgcaggacctcaccaccatcaggggagacggcgcccctgctccctcgggccccccaccaccggggtctgggcgggccagcggcaaacacggccagcctaagatgtccaggagtgcttctgagagcgctagcagctcaggcaccgcctagaatccttcgatctcgcttcaggaagaaaagtacctcatcctcggccaccgaaaccacgtgagtgagatgagccaacagcaccggatccacagaatgtttcttctctgccttaaagagctattcactaataacatagaaatccgcaagctgggtgtgctttgagtgtgcagcctcacaaacatggccttttctctctccccttccacttttaaggatttatttttttcccccttttctttattttgctggggagaggctaaagggaaaggtagtaggggcgggggtggtgacctttaagtcttctgaggttggtaattttccacaattggattgtcattatagacagcagtgtgttttttagaaagataagagaatcacccctatgctgctgagatgtacatttgtaatttatctgttgcatacttagtttttagtcctgtaaatgcaaacacagcattttttacaactttctttgttcttggtacttatactttgaactatgatgtacatatttatggcttttggcttttaatataatggacttgcaagggctgccagaggttctgatatgtaagaaaactgcaaaaacaaatatagacaaatattttgattctagagaacgtctcagatgtgcttataaagcttccaaatacaactccagtaagacatccctttccctgcaggagtgtggtctatattctttagatagttgtttagtcaaaagaccagacaagttacaaactaagagaaacaatatttcacaacacagtaaagtgtgatgagaggtcaggggaacatcccagtaaaagagaagagtcacaggaagctcatctcctccctggattctggattaggagcttctgaatcttttccagggataggcaggtagctcactcttggtgcaatttcttgaggatgggaacatgtagagctgctggaaggagtaattctgtgcttgacaaaggacgatttctcctttatcgtgaccagtgctgccgatttcctgacagaggagcttacactctgagcaccttgttttagcgaactctagcaaaacttgtttagcttagcaaaaacaaacacacaaaaaactgagaactctgctgtttcagatatgccataacatacatctgaaacacatgtgtaacaatcaaaatggtgggctctagaatggttttggagctcgagatcttcatgggttagacttgctggtcagacccaggagcacctgtggctcacaccttctgttcccctcctggcctgtgcagaatgtaaacagcagactcatactcaatgggcactacaggccttatcagacgttttatacaagcctggattgcttagtaggggaataaggcattctctgagggggctttccacttagattgagaattttatttgaaaagaatctggtttaaatggcattgtggtccgaggtagctgctctccccactgagagctgagccgaaatataagaataatatatttgtgcttcgagttggtgtttctttcagtgtaatgcatgcagtggtcacaacccagttactcataatatttggattgtatttgttcgtagatatgcccagaagactagagaattagtgttatataccatatagaacttactgtcagtcaactataaacaggcccaattaaaaactgttccattactacgcaaacacatattagaggcctttgctgatgacacattagctggatcttagccaccccagaaagggtttgatttgaagctgattgttgccagatatgcatattggaatcccatctacccatagttcctctgaaggtgattttgtaatttgcaaaagggtataggaaaatatacctaaaagcgaatttgtggctgagaggataaacagaagctgtttgctcatgttctgtgccccacacccaccaatacctaaatctgttaaggaagacagaaaatgttttctttgtgctcattgagtagttccagacagaagaagaatatactctttaaaatgtatttacctgttagttggaagtacccagaattatcagaaacgaatgcaaaaaaaaaaaaaaaaaaaaaaagcttacacagcttcttagcaatttttttttttttgccgaaacaataaattgcctttagcagcagtttaaaatcctatcgtgaacaacctatattttcgccattttacaatggagagttgtgacaagtacaggttatcaagtttgcacttaactatgccaaaaaaagtttgaagcgctctattctcagacatgctgtattattacttctcattcaagattgaaaaatataaaggtatccaaactctgtcttaatgtaaatgtaactatttttccttcaagtgttgactagggagtcggtttctctcttaaagacactcactgtacaactgaaagcagctgtcatatttctggcaaaatgtgtttacgtatctgacaagttgtacatttgtgtatgaactgacataaaatgtgaaagcctgtaagtgtacatgtagtggtgtggtgttctgtctagaggatacaactgaatgtttttaatttgctgacttacagacacaggctgtttacaaaatgctagctggaaagtctgtaatgttcatgtcataacttttagttaattgccattgagcacctgttctgaggaggtgagatgtggacttgtgcttataaactggagagtttagtcataatccctcctggctttgtgtgaatagcttgctcactttgctggcctttgaaatgtgttctccgtgataagctatccatgtgtttgtgataagagtgcttgtcaaccatgaccatctttgagccttcctagtcctccacctggcacagtatttgaaatggcaaaggatgtgcttcatcctctaacagtgtacactcccagagctgatattctggattttgactgtgcacatttcctctagttcatgtctgtagtccctatagaatgatctgtaataaaatagtatactggactgtgcatcaaagggatgtaaaattacagtattccaaaggttgaagttctgctgttttgttataatgcctgatacacatcttgaataaagtcttaacatttttcttttaaaaaaaaaaaaaaaaa

SEQ ID NO: 107 - protein, 201 aa, Homo sapiens
  ref <308>: DATABASE ACCESSION NUMBER: NCBI / NP_075063.1
  ref <309>: DATABASE ENTRY DATE: 2014-05-03
  ref <313>: RELEVANT RESIDUES IN SEQ ID NO: (1)..(201)
MVSWIISRLVVLIFGTLYPAYYSYKAVKSKDIKEYVKWMMYWIIFALFTTAETFTDIFLCWFPFYYELKIAFVAWLLSPYTKGSSLLYRKFVHPTLSSKEKEIDDCLVQAKDRSYDALVHFGKRGLNVAATAAVMAASKGQGALSERLRSFSMQDLTTIRGDGAPAPSGPPPPGSGRASGKHGQPKMSRSASESASSSGTA

SEQ ID NO: 108 - DNA, 9145 bp, Homo sapiens
  ref <308>: DATABASE ACCESSION NUMBER: NCBI / NM_145793.3
  ref <309>: DATABASE ENTRY DATE: 2014-03-16
  ref <313>: RELEVANT RESIDUES IN SEQ ID NO: (1)..(9145)
gctctcatctcaaagcgcgccctcccttccaggttgggtcggacctgaacccctaaaagcggaaccgcctcccgccctcgccatcccggagctgagtcgccggcggcggtggctgctgccagacccggagtttcctctttcactggatggagctgaactttgggcggccagagcagcacagctgtccggggatcgctgcacgctgagctccctcggcaagacccagcggcggctcgggatttttttgggggggcggggaccagccccgcgccggcaccatgttcctggcgaccctgtacttcgcgctgccgctcttggacttgctcctgtcggccgaagtgagcggcggagaccgcctggattgcgtgaaagccagtgatcagtgcctgaaggagcagagctgcagcaccaagtaccgcacgctaaggcagtgcgtggcgggcaaggagaccaacttcagcctggcatccggcctggaggccaaggatgagtgccgcagcgccatggaggccctgaagcagaagtcgctctacaactgccgctgcaagcggggtatgaagaaggagaagaactgcctgcgcatttactggagcatgtaccagagcctgcagggaaatgatctgctggaggattccccatatgaaccagttaacagcagattgtcagatatattccgggtggtcccattcatatcagtggagcacattcccaaagggaacaactgcctggatgcagcgaaggcctgcaacctcgacgacatttgcaagaagtacaggtcggcgtacatcaccccgtgcaccaccagcgtgtccaacgatgtctgcaaccgccgcaagtgccacaaggccctccggcagttctttgacaaggtcccggccaagcacagctacggaatgctcttctgctcctgccgggacatcgcctgcacagagcggaggcgacagaccatcgtgcctgtgtgctcctatgaagagagggagaagcccaactgtttgaatttgcaggactcctgcaagacgaattacatctgcagatctcgccttgcggatttttttaccaactgccagccagagtcaaggtctgtcagcagctgtctaaaggaaaactacgctgactgcctcctcgcctactcggggcttattggcacagtcatgacccccaactacatagactccagtagcctcagtgtggccccatggtgtgactgcagcaacagtgggaacgacctagaagagtgcttgaaatttttgaatttcttcaaggacaatacatgtcttaaaaatgcaattcaagcctttggcaatggctccgatgtgaccgtgtggcagccagccttcccagtacagaccaccactgccactaccaccactgccctccgggttaagaacaagcccctggggccagcagggtctgagaatgaaattcccactcatgttttgccaccgtgtgcaaatttacaggcacagaagctgaaatccaatgtgtcgggcaatacacacctctgtatttccaatggtaattatgaaaaagaaggtctcggtgcttccagccacataaccacaaaatcaatggctgctcctccaagctgtggtctgagcccactgctggtcctggtggtaaccgctctgtccaccctattatctttaacagaaacatcatagctgcattaaaaaaatacaatatggacatgtaaaaagacaaaaaccaagttatctgtttcctgttctcttgtatagctgaaattccagtttaggagctcagttgagaaacagttccattcaactggaacattttttttttttccttttaagaaagcttcttgtgatcctttggggcttctgtgaaaaacctgatgcagtgctccatccaaactcagaaggctttgggatatgctgtattttaaagggacagtttgtaacttgggctgtaaagcaaactggggctgtgttttcgatgatgatgatgatcatgatgatgatcatcatgatcatgatgatgatcatcatgatcatgatgatgattttaacagttttacttctggcctttcctagctagagaaggagttaatatttctaaggtaactcccatatctcctttaatgacattgatttctaatgatataaatttcagcctacattgatgccaagcttttttgccacaaagaagattcttaccaagagtgggctttgtggaaacagctggtactgatgttcacctttatatatgtactagcattttccacgctgatgtttatgtactgtaaacagttctgcactcttgtacaaaagaaaaaacacctgtcacatccaaatatagtatctgtcttttcgtcaaaatagagagtggggaatgagtgtgccgattcaatacctcaatccctgaacgacactctcctaatcctaagccttacctgagtgagaagccctttacctaacaaaagtccaatatagctgaaatgtcgctctaatactctttacacatatgaggttatatgtagaaaaaaattttactactaaatgatttcaactattggctttctatattttgaaagtaatgatattgtctcatttttttactgatggtttaatacaaaatacacagagcttctttcccctcataagtagtgttcgctctgatatgaacttcacaaatacagctcatcaaaagcagactctgagaagcctcgtgctgtagcagaaagttctgcatcatgtgactgtggacaggcaggaggaaacagaacagacaagcattgtcttttgtcattgctcgaagtgcaagcgtgcatacctgtggagggaactggtggctgcttgtaaatgttctgcagcatctcttgacacacttgtcatgacacaatccagtaccttggttttcaggttatctgacaaaggcagctttgattgggacatggaggcatgggcaggttctcctttctttggaaacacatccatgctgggatgcacagttcttttcctaaggattgtgtttactcctgactgcaacgtcttggccactgtttggagcagtttggtctgaaggtcattaaggatctgcttgcatcttgtttcatgtcctccgtgacagactgcagaccatgttagaagagaaggaaggtttgtggatcaagagggttgacattaggtttggtgagatgagttgcttggcacagatcagcagaacaggaccctggtgataaggcatctggctttgctaaccacttatcatcttccattattctctttcttaactaagtagacccgaaagtgcacttttgaagtctggtttagatggcgagattccgaatctacaatgatcgagtactggtggccacttttctccaacattaagtaaagaggaggagattccaccttcagaaagtgctgggaagcattggctttcttcccacattggtagaagagatggaggaggaaaccagggtgcacatttctacagatcccctttgcctgctggtgtttgccttgtaagataagtcactggggggaaggggaaatctatgaaatccaagataaaggcatagtctttcagctctattggtgttaaaagtatatttgtgtccaaatgttaatcaacacaaatgtacagtactcagtactgacttttttcacttcaaaatgttttcaagggaaattcagcagacacccaactgtatttaattagtgaaaagatctataaagactcttactttgaataaacacattaagtaagtgtgtcaaaatatttggaatgccagttatctatgagcgcatatctcttacagagtgtattttgttttcattaaggtatctctgtgtatctacactggactaatttcatagggatctgattctatgtgatccactgtagaaagctactgattacttctgcagtaacagcagctctaattagcatcagatgaccaaagcggaaatgggagtttcagcgctaacaagggcagccttcattgaagaatgcatgggtaggcaatatataaattacattttgaaaagcctcatctgtcaccaacaaatatctcatttttcttcagtgataaaagcatattcaagttaccagctcctcaatttgaaaatcagttgctgattaaataaatagggggaagcatcttgttcagggacaacacgttagagagattcttatcaaagcaagccaagcaaggtttccgccattcagtgtgatcttagtttgacacggtgaccctaaaacaccatcatttgccccagaactggagcacaataagttaaatcatttacctgtctcacttcttcttggcgtgcttaaaagcaaaaatgattcgctacttcctgtccttcagtccgggcatttggggtgccactgaagacaggggttatctgctgaggtttgggtgtcttgcaggaagtatctcattgcagttgattttgatgaaaccaaacagtaactagggtccatgcagaccgtgactccctgattacatctagccatgccctacttatttcagagagaaagagagggggaataaaggcagtattgccacactgattagaagcacattcattccactttgatgttgaatatttttgaccgatacatgcttgagtatctttttaatagagcacatgaaggaagaagcacacaatatagagaaggaattgagaatgccaattacatatttatttttccatacctgatttttttcaagtctgtaataaaaaaagtataagttgagattaacataggttatttttcatgaagtatagcaaacgatctagaatgtgataggagtgtggtttccatttctttttttttttttttaacagacttttgtgctgtagtaagaatgtcttagaagttgtgtcttcgagttcctcaaacaccggacagggctcccccagagctgcctcagcctttgatttggtccatattcagacacttcctgtcttgcatacactctgaggatgggccgcttctagctgccgcccgtctccctcttgccttcttgtctctaaatcagacactcccaagcactccatctgctatactaggagagtgggagagccaaagcattttggagtccatgtaaagtgcctgggaaaagagatgtaagagcagtgggagtttatataattagcgaattcttttctcagaattcagcggaaatgtatttctgttgttattatttacaaaattgtggcctcagaggagctgtcttttggaaaataagttttcattcatgcagttagttagacatgcacgatgtacttgaatcaataaactgtggaccagaaaagggctgcttaaatgaattcacgtgttctaattctctttcgaggctgttgatgacctcctggattcatacccccatgatctgtcttgctcttgcctctgttctttgataaagcacatcagactatgtgacacccatcttttcaagaacgacctaaaagcaatgacaacaggcaggagagaattaccactggcctgggcacagtgacagcagaaggcccacctgagcttggagagttggcgagataaggcaaaatcaaggtgcaacagtgggccatgttccaagggtgaatggatctgagagtccgctgatgttccttactgatcagaacagggaccttctaacgaaacagccagagttccttgaatcaggcagaagttctttagagacaggaagccagagctattgataatatccgaacgacagaggaaggaatttcttattagaaattctaaaataaaacaagtggggatttggttggatacccttagaagctacatttttctctcatccctaagatagatatctcaagtgtatatctgacacctcttggctttgacacggctctgcttctcaagtgaccatttgttttaagtctgttgtctagaattctttgtgggggctggacctctgaaaaagattctcactgcagaggctttaaatctgtgtttttttccactccctccgtcctgggatgtattcggtaggacatttcatttatatcaggatattggctgattcagctctctttcatcgttattattcaggcctccctccaccaccttgttctttattgcctaagtattgccctccccaattcttcatcgtaatagctctaaatttagtttgacccaaattaatttttgttccaacagatatattttaagacagagaagcctctctcaggagccagatgatctgaagatgatgctaatccccaaatacgaagttcctccagctaactctcctctgagctccctcttcttagctttgggattggggatggtctcatccttgccaggaatccctttgttgctcccagtgtctctgatgagcttctcctccctcccagagacaatgcaggggtggttttcagcagaatgtgccacctgcacttctgattgttctgagacccagcccagaggggtggagaaggcgcacaaaccctattccaataaactgcctgcagagaaccacagcctgctaatagtcgttgaggtctcagccccctaaggtctccaagctcatttgaccagcgcagctgcgacttcggctgtctgcctctggcaggtgccaatatcagcatcttgtcccactgccatggggagttaatttttgctccagggcagctgccaagcccagcaccggcatcaatagaaggttttctctgattttcttctcttcctctcaggctaggctttcttaccaatccccaattttcttctgtagggcgccaggagactggccagagatctttagactcttacttagtttgaacatctcttgctgctcacacccaggcttcttcagcagaaagcatgacccatagtaggtactcagaaactggttgaatgaaaagccttgacatttaagggctttattctgtcatacggtagcaagaactggcctattggcatcgtattcctggcattgagctgtattgaccctgaatgtgtcctcctgaggtttttgagggtgacctaggagaaagggtctgaaaaagcactgggatccaagtgactttaaatctgcccgtggcatttcctgctgagaggcgagaaactagcatctctcccaacaggctcacatccgccaggaaggacagagcccaaaacgggggtagactttgtgggaaattcgccagttagtccgctgagattttaatctgcctcaagcacaggatgctgacaagaaaggtagaccactcccccgatcccagacaaaccccaggggtgacaacttctccatcagtatcctgagaagcaacatcaaatgcttaccaagtcagcacgtttactgagtgagtactctgacggaataaaccagcatttggagctgaacttgagaacacagggccctctgacagcagcttagggaaacacccatcccttccagattggcagaatccttccatttcatgtccttcggagacgctgtattctctttacaaatcattcatgaaactgagactcagtctcccaggggtaagtcctgggccacgtgcaaacaatggcaaatccagctcttccatgatagagaaggcaaacacacccaccttcatcctgagcctaaaaggccacctctgagcacttgggcagccactcctctgggcctcagagggccatgagcttggccaggtaggcacagcggcggggaagtcacagctgtcaggtaccggccatggtgcaggtgggaataggagatgccagagctgctttagctgaggaaagcaaacagtcagcagtgctcaaaggagcaaaacttcgaatgtgcacattgacccctgacacctgcaagcataacacagatcctaagactagagtgaagtaggaagaagaattagaaaatccagtggatgtcctgagtatagggaaccagggccgttgaaaatcagtaaaggttgattacctggggcgagaccgggtgactgtggcagtgcaggtgaaggtaccctggaccttctcagttcgctggcacataaggctccgccaataaagcgtggttctctctgtcacacacacacacacacacacacacacacacacacacacacacacacacacaatgattggagggctatatgatccagcattagcttcctggtgtgccaagcatgcttgatcgggaatttttttttattattattattttttagctgtagctgaaggcatttctcggatgtggagaggagaatggaaatcgcagaaccaaatcagtttgccctgccatatttggctgtggtctgtcattgggcatttctgatgtgcttttctggattcaggaagagctgattgtcctccgagggttgaaaaaaaaaaaacagtttcagaaacctgaatccagggccttatagttctcctcattatctatcttcttctcccttccctcgcccaagggagtgggggaaacacttttcactgcagagtttgctttaaagttttcccatcttgcgtgcattatcccttgatattaaaattattttctcagtttaatccaactcctgctgagaagctgtgtgagatttaggctgtggggtttttttcttgtactcttttggatggtgttgcatttttcactcttaacccgagggtgtgtttcagcttatgttcgttctgtttcatgcaggtttatagcacggtagagtagaaggcggcttctgatttttagggtatttttagaattcattcctgagtgaggggttcagacacccagtctcctcggaacaggggtgaggggtcgactgagctttgttgagaagcctccagttaggcttcgggcgggtctccatgttatattgtgtgtttactgagcttcccactggtagaagatgacacatttgtccatcgtcctgtgtatctgctttccagaggacaccggagcattctcctggggtcactcccacatggctgcctcacatagctgttttgcaacagcctttattgccaacacccttggaagaacatctcctgtagaagtacaagttttgcaatatggactttggaagtggttttgtgatgttcgaattttctgttagcctattgctcaagcactacagaatgtacatagtccctttggccatcctctcaccccagaatatcctaataaacattgttttcttttttaaaaaaaaaaaaaaaaaaa

SEQ ID NO: 109 - protein, 460 aa, Homo sapiens
  ref <308>: DATABASE ACCESSION NUMBER: NCBI / NP_665736.1
  ref <309>: DATABASE ENTRY DATE: 2014-03-16
  ref <313>: RELEVANT RESIDUES IN SEQ ID NO: (1)..(460)
MFLATLYFALPLLDLLLSAEVSGGDRLDCVKASDQCLKEQSCSTKYRTLRQCVAGKETNFSLASGLEAKDECRSAMEALKQKSLYNCRCKRGMKKEKNCLRIYWSMYQSLQGNDLLEDSPYEPVNSRLSDIFRVVPFISVEHIPKGNNCLDAAKACNLDDICKKYRSAYITPCTTSVSNDVCNRRKCHKALRQFFDKVPAKHSYGMLFCSCRDIACTERRRQTIVPVCSYEEREKPNCLNLQDSCKTNYICRSRLADFFTNCQPESRSVSSCLKENYADCLLAYSGLIGTVMTPNYIDSSSLSVAPWCDCSNSGNDLEECLKFLNFFKDNTCLKNAIQAFGNGSDVTVWQPAFPVQTTTATTTTALRVKNKPLGPAGSENEIPTHVLPPCANLQAQKLKSNVSGNTHLCISNGNYEKEGLGASSHITTKSMAAPPSCGLSPLLVLVVTALSTLLSLTETS

SEQ ID NO: 110 - DNA, 2898 bp, Homo sapiens
  ref <308>: DATABASE ACCESSION NUMBER: NCBI / NM_003360.3
  ref <309>: DATABASE ENTRY DATE: 2014-02-02
  ref <313>: RELEVANT RESIDUES IN SEQ ID NO: (1)..(2898)
gggttggttccaagtctttgctattgtgaatagtgccgcaataaacatacgtgtgcatgtgtctttatagcagcatgatttatagtcctttgggtatatacccagtaatgggatggctgggttctagatccctgaggaatcgccacattgacttgcacaatggttgaactagtttacagtcccaccaacagtgtaaaagtgttcctatttctccacatcctctccggcacctgttgtttcctgactttttaatgattgccattctaactggtgtgagatgatatctcattgtggttttgatttgcatttctctgatggccagtgatggtgagcattttttcatgtgttttttggctgcataaatgtcttcttttgagaagtgtctgttcatgattttttttttagacaaagtattagatcagatatttttggggaaaaatgctttgtgattgcttgttttgaatggtgagcattgtattttgttttaagttgttttctggttgttattacagctatgaagtcttacactccatatttcattctcctgtggagtgctgttgggatagcgaaggctgccaaaatcatcatcgtgccgccaattatgtttgaaagccatatgtacattttcaagacgctagcctcagccttgcacgagagaggccaccatacagtgttcctcctctctgaaggcagagacatcgccccatctaatcattacagcctccagcgctacccagggatctttaacagtaccacctcagatgctttcctacagtccaagatgcggaatattttctctgggagattgacagcaatcgaactgtttgacatactggatcactatactaagaactgtgacctgatggttggcaaccatgccctgatccagggtctgaagaaagaaaaatttgacctgctgctggtggaccctaatgatatgtgtggatttgtgatagctcatcttttaggggttaaatatgctgtattttcaactggcctttggtatcctgctgaagtgggtgctcctgctccattagcatacgtcccagagtttaactcactcctcacagaccgcatgaacttgctgcaaaggatgaaaaataccggtgtttacctcatttccagattaggggtcagctttctggttcttcccaaatatgaaaggataatgcagaagtacaacctgctgccggagaagtccatgtatgatttggttcatgggtccagcctgtggatgctgtgtactgacgtagcactggaattcccaagacccactctgcctaatgttgtttatgtaggaggaatcctaaccaaaccagccagcccactaccagaagatctccaaagatgggtaaatggtgctaatgaacatggctttgtcttggtgtcttttggagctggtgtcaagtatctgtcagaagacattgctaacaaactggcaggagctctggggagattgcctcaaaaagtgatttggaggttttctggacccaaaccaaagaatctaggaaacaacactaaactcatagaatggttaccacaaaatgacctgcttgggcattcaaagattaaagccttcctgagccatggtggtttgaacagtatttttgaaactatgtatcatggtgtgcctgtagtgggaattccactctttggagaccattatgatactatgaccagagtacaggcaaaaggcatggggatattgctagaatggaagacagttactgaaaaagagctctatgaagcactagtgaaggttatcaataatcccagctaccgtcagagggctcagaagctttcggaaattcacaaggatcaacctggtcaccctgtcaatcgaactatctattggatagattatattattcgtcacaatggagcccatcacctacgtgccgctgtccatcagatctccttttgtcagtattttttactggatattgcctttgtgcttttgcttggtgctgccttgttatactttctcttgtcttgggtgacaaaatttatctacagaaaaatcaaaagtctgtggtctagaaataagcatagcacagttaatggacattaccacaatggaatcctcaatggcaagtacaaaagaaatggccatattaaacatgaaaagaaagtgaaatgagccaacagcccaggtgatagaaataaattggttcactcattgaatttttattgctattatttagtctaacagctactaaaagtaaaacatcagtaaacaattctaacatgcccttatgagatctactaatgaaattctgtggaattaagatggctgtaaaaagcacaaacctaaaatgcagaaatgtattttattcaaatactgatgtagagagttttggcactgaaccttttagaagccttaattatttaaatcaattcagtgactgtgtcagaccttagttttaaatcttgatatgtgcgtgtcccggatcaggaatggtttcatttttcttaataatgtgtgtgtgtgtatgtgtgtgtgtgtgtgtgtgtgtttgtgtgtgtgtgtgtgtgtcctaattaagagaatttttactggctgcttgttacatttgttgagggtacaacacactcaagaataaagtaaaaggatagtcaggatccagatgtttcttttctagcatttaatgtgtgtgaactcagaacactaccatgaaagaacacttccccccaaaactggatgcagaggaagaaaaaaaaaaaagaaatggcacagttttttgtatttttttttttagttattttttgttgttgttgtttgtattgtttttcttttctgatagagtatggccacttctgggggaaaaacatgtaattaagtaaatgtatacattggttttcacgttttacttttgttttcccactaccaataatttt

SEQ ID NO: 111 - protein, 541 aa, Homo sapiens
  ref <308>: DATABASE ACCESSION NUMBER: NCBI / NP_003351.2
  ref <309>: DATABASE ENTRY DATE: 2014-02-02
  ref <313>: RELEVANT RESIDUES IN SEQ ID NO: (1)..(541)
MKSYTPYFILLWSAVGIAKAAKIIIVPPIMFESHMYIFKTLASALHERGHHTVFLLSEGRDIAPSNHYSLQRYPGIFNSTTSDAFLQSKMRNIFSGRLTAIELFDILDHYTKNCDLMVGNHALIQGLKKEKFDLLLVDPNDMCGFVIAHLLGVKYAVFSTGLWYPAEVGAPAPLAYVPEFNSLLTDRMNLLQRMKNTGVYLISRLGVSFLVLPKYERIMQKYNLLPEKSMYDLVHGSSLWMLCTDVALEFPRPTLPNVVYVGGILTKPASPLPEDLQRWVNGANEHGFVLVSFGAGVKYLSEDIANKLAGALGRLPQKVIWRFSGPKPKNLGNNTKLIEWLPQNDLLGHSKIKAFLSHGGLNSIFETMYHGVPVVGIPLFGDHYDTMTRVQAKGMGILLEWKTVTEKELYEALVKVINNPSYRQRAQKLSEIHKDQPGHPVNRTIYWIDYIIRHNGAHHLRAAVHQISFCQYFLLDIAFVLLLGAALLYFLLSWVTKFIYRKIKSLWSRNKHSTVNGHYHNGILNGKYKRNGHIKHEKKVK

SEQ ID NO: 112 - DNA, 6007 bp, Homo sapiens
  ref <308>: DATABASE ACCESSION NUMBER: NCBI / NM_001018111.2
  ref <309>: DATABASE ENTRY DATE: 2014-03-27
  ref <313>: RELEVANT RESIDUES IN SEQ ID NO: (1)..(6007)
agccgcgcagacgccgcccaggacgcagccgccgccgccgccgctcctctgccactggctctgcgccccagcccggctctgctgcagcggcagggaggaagagccgccgcagcgcgactcgggagccccgggccacagcctggcctccggagccacccacaggcctccccgggcggcgcccacgctcctaccgcccggacgcgcggatcctccgccggcaccgcagccacctgctcccggcccagaggcgacgacacgatgcgctgcgcgctggcgctctcggcgctgctgctactgttgtcaacgccgccgctgctgccgtcgtcgccgtcgccgtcgccgtcgccctcccagaatgcaacccagactactacggactcatctaacaaaacagcaccgactccagcatccagtgtcaccatcatggctacagatacagcccagcagagcacagtccccacttccaaggccaacgaaatcttggcctcggtcaaggcgaccacccttggtgtatccagtgactcaccggggactacaaccctggctcagcaagtctcaggcccagtcaacactaccgtggctagaggaggcggctcaggcaaccctactaccaccatcgagagccccaagagcacaaaaagtgcagacaccactacagttgcaacctccacagccacagctaaacctaacaccacaagcagccagaatggagcagaagatacaacaaactctggggggaaaagcagccacagtgtgaccacagacctcacatccactaaggcagaacatctgacgacccctcaccctacaagtccacttagcccccgacaacccacttcgacgcatcctgtggccaccccaacaagctcgggacatgaccatcttatgaaaatttcaagcagttcaagcactgtggctatccctggctacaccttcacaagcccggggatgaccaccaccctactagagacagtgtttcaccatgtcagccaggctggtcttgaactcctgacctcgggtgatctgcccaccttggcctcccaaagtgctgggattacagcgtcatcggttatctcgcaaagaactcaacagacctccagtcagatgccagccagctctacggccccttcctcccaggagacagtgcagcccacgagcccggcaacggcattgagaacacctaccctgccagagaccatgagctccagccccacagcagcatcaactacccaccgataccccaaaacaccttctcccactgtggctcatgagagtaactgggcaaagtgtgaggatcttgagacacagacacagagtgagaagcagctcgtcctgaacctcacaggaaacaccctctgtgcagggggcgcttcggatgagaaattgatctcactgatatgccgagcagtcaaagccaccttcaacccggcccaagataagtgcggcatacggctggcatctgttccaggaagtcagaccgtggtcgtcaaagaaatcactattcacactaagctccctgccaaggatgtgtacgagcggctgaaggacaaatgggatgaactaaaggaggcaggggtcagtgacatgaagctaggggaccaggggccaccggaggaggccgaggaccgcttcagcatgcccctcatcatcaccatcgtctgcatggcatcattcctgctcctcgtggcggccctctatggctgctgccaccagcgcctctcccagaggaaggaccagcagcggctaacagaggagctgcagacagtggagaatggttaccatgacaacccaacactggaagtgatggagacctcttctgagatgcaggagaagaaggtggtcagcctcaacggggagctgggggacagctggatcgtccctctggacaacctgaccaaggacgacctggatgaggaggaagacacacacctctagtccggtctgccggtggcctccagcagcaccacagagctccagaccaaccaccccaagtgccgtttggatggggaagggaaagactggggagggagagtgaactccgaggggtgtcccctcccaatccccccagggccttaatttttcccttttcaacctgaacaaatcacattctgtccagattcctcttgtaaaataacccactagtgcctgagctcagtgctgctggatgatgagggagatcaagaaaaagccacgtaagggactttatagatgaactagtggaatcccttcattctgcagtgagattgccgagacctgaagagggtaagtgacttgcccaaggtcagagccacttggtgacagagccaggatgagaacaaagattccatttgcaccatgccacactgctgtgttcacatgtgccttccgtccagagcagtcccgggcaggggtgaaactccagcaggtggctgggctggaaaggagggcagggctacatcctggctcggtgggatctgacgacctgaaagtccagctcccaagttttccttctcctaccccagcctcgtgtacccatcttcccaccctctatgttcttacccctccctacactcagtgtttgttcccacttactctgtcctggggcctctgggattagcacaggttattcataaccttgaaccccttgttctggattcggattttctcacatttgcttcgtgagatgggggcttaacccacacaggtctccgtgcgtgaaccaggtctgcttaggggacctgcgtgcaggtgaggagagaaggggacactcgagtccaggctggtatctcagggcagctgatgaggggtcagcaggaacactggcccattgcccctggcactccttgcagaggccacccacgatcttctttgggcttccatttccaccagggactaaaatctgctgtagctagtgagagcagcgtgttccttttgttgttcactgctcagctgatgggagtgattccctgagacccagtatgaaagagcagtggctgcaggagaggccttcccggggccccccatcagcgatgtgtcttcagagacaatccattaaagcagccaggaaggacaggctttcccctgtatatcataggaaactcagggacatttcaagttgctgagagttttgttatagttgttttctaacccagccctccactgccaaaggccaaaagctcagacagttggcagacgtccagttagctcatctcactcactctgattctcctgtgccacaggaaaagagggcctggaaagcgcagtgcatgctgggtgcatgaagggcagcctgggggacagactgttgtgggaacgtcccactgtcctggcctggagctaggccttgctgttcctcttctctgtgagcctagtggggctgctgcggttctcttgcagtttctggtggcatctcaggggaacacaaagctatgtctattccccaatataggacttttatgggctcggcagttagctgccatgtagaaggctcctaagcagtgggcatggtgaggtttcatctgattgagaagggggaatcctgtgtggaatgttgaactttcgccatggtctccatcgttctgggcgtaaattccctgggatcaagtaggaaaatgggcagaactgcttaggggaatgaaattgccatttttcgggtgaaacgccacacctccagggtcttaagagtcaggctccggctgtagtagctctgatgaaataggctatccactcgggatggcttactttttaaaagggtagggggaggggctggggaagatctgtcctgcaccatctgcctaattccttcctcacagtctgtagccatctgatatcctaggggaaaaggaaggccaggggttcacatagggccccagcgagtttcccaggagttagagggatgcgaggctaacaagttccaaaaacatctgccccgatgctctagtgtttggaggtgggcaggatggagaacagtgcctgtttgggggaaaacaggaaatcttgttaggcttgagtgaggtgtttgcttccttcttgcccagcgctgggttctctccacccagtaggttttctgttgtggtcccgtgggagaggccagactggattattcctcctttgctgatcctgggtcacacttcaccagccagggcttttgacggagacagcaaataggcctctgcaaatcaatcaaaggctgcaaccctatggcctcttggagacagatgatgactggcaaggactagagagcaggagtgcctggccaggtcggtcctgactctcctgactctccatcgctctgtccaaggagaacccggagaggctctgggctgattcagaggttactgctttatattcgtccaaactgtgttagtctaggcttaggacagcttcagaatctgacaccttgccttgctcttgccaccaggacacctatgtcaacaggccaaacagccatgcatctataaaggtcatcatcttctgccacctttactgggttctaaatgctctctgataattcagagagcattgggtctgggaagaggtaagaggaacactagaagctcagcatgacttaaacaggttgtagcaaagacagtttatcatcagctctttcagtggtaaactgtggtttccccaagctgcacaggaggccagaaaccacaagtatgatgactaggaagcctactgtcatgagagtggggagacaggcagcaaagcttatgaaggaggtacagaatattctttgcgttgtaagacagaatacgggtttaatctagtctaggcaccagatttttttcccgcttgataaggaaagctagcagaaagtttatttaaaccacttcttgagctttatcttttttgacaatatactggagaaactttgaagaacaagttcaaactgatacatatacacatatttttttgataatgtaaatacagtgaccatgttaacctaccctgcactgctttaagtgaacatactttgaaaaagcattatgttagctgagtgatggccaagttttttctctggacaggaatgtaaatgtcttactggaaatgacaagtttttgcttgatttttttttttaaacaaaaaatgaaatataacaagacaaacttatgataaagtatttgtcttgtagatcaggtgttttgttttgtttttttaattttaaaatgcaaccctgccccctccccagcaaagtcacagctccatttcagtaaaggttggagtcaatatgctctggttggcaggcaaccctgtagtcatggagaaaggtatttcaagatctagtccaatctttttctagagaaaaagataatctgaagctcacaaagatgaagtgacttcctcaaaatcacatggttcaggacagaaacaagattaaaacctggatccacagactgtgcgcctcagaaggaataatcggtaaattaagaattgctactcgaaggtgccagaatgacacaaaggacagaattcctttcccagttgttaccctagcaaggctagggagggcatgaacacaaacataagaactggtcttctacactttctctgaatcatttaggtttaagatgtaagtgaacaattctttctttctgccaagaaacaaagttttggatgagcttttatatatggaacttactccaacaggactgagggaccaaggaaacatgatgggggaggcagagagggcaagagtaaaactgtagcatagcttttgtcacggtcactagctgatccctcaggtctgctgcaaacacagcatggaggacacagatgactctttggtgttggtctttttgtctgcagtgaatgttcaacagtttgcccaggaactgggggatcatatatgtcttagtggacaggggtctgaagtacactggaatttactgagaaacttgtttgtaaaaactatagttaataattattgcattttcttacaaaaatatattttggaaaattgtatactgtcaattaaagtgtttttgtgtaaactggttcaaaaaaaaaaaaaaaaaaaaaaaaa

SEQ ID NO: 113 - protein, 558 aa, Homo sapiens
  ref <308>: DATABASE ACCESSION NUMBER: NCBI / NP_001018121.1
  ref <309>: DATABASE ENTRY DATE: 2014-03-27
  ref <313>: RELEVANT RESIDUES IN SEQ ID NO: (1)..(558)
MRCALALSALLLLLSTPPLLPSSPSPSPSPSQNATQTTTDSSNKTAPTPASSVTIMATDTAQQSTVPTSKANEILASVKATTLGVSSDSPGTTTLAQQVSGPVNTTVARGGGSGNPTTTIESPKSTKSADTTTVATSTATAKPNTTSSQNGAEDTTNSGGKSSHSVTTDLTSTKAEHLTTPHPTSPLSPRQPTSTHPVATPTSSGHDHLMKISSSSSTVAIPGYTFTSPGMTTTLLETVFHHVSQAGLELLTSGDLPTLASQSAGITASSVISQRTQQTSSQMPASSTAPSSQETVQPTSPATALRTPTLPETMSSSPTAASTTHRYPKTPSPTVAHESNWAKCEDLETQTQSEKQLVLNLTGNTLCAGGASDEKLISLICRAVKATFNPAQDKCGIRLASVPGSQTVVVKEITIHTKLPAKDVYERLKDKWDELKEAGVSDMKLGDQGPPEEAEDRFSMPLIITIVCMASFLLLVAALYGCCHQRLSQRKDQQRLTEELQTVENGYHDNPTLEVMETSSEMQEKKVVSLNGELGDSWIVPLDNLTKDDLDEEEDTHL

SEQ ID NO: 114 - DNA, 3024 bp, Homo sapiens
  ref <308>: DATABASE ACCESSION NUMBER: NCBI / NM_001005914.2
  ref <309>: DATABASE ENTRY DATE: 2014-06-14
  ref <313>: RELEVANT RESIDUES IN SEQ ID NO: (1)..(3024)
aaactttacggcacggcgggcggtgcgtggggcggtggctggcctggtgggggcgggggctgcttcttaaaggagccgtcagagggtccccagcggccccagggtgggaaggggccagagtggagagatgctgctgcggaagtcctcggtggagtgtgagaaggcagccagtgttggcctggaagacctctagaacctgagaagaggcagcgatcctggggcagagtccagggcagctcaaggctcctccacacacacacccgctgaaccctgagcaccctgagctgctgagatggggcgggccggggctgccgccgtgatcccgggcctggccctgctctgggcagtggggctggggagtgccgcccccagccccccacgccttcggctctccttccaagagctccaggcctggcatggtctccagactttcagcctggagcgaacctgctgctaccaggccttgctggtggatgaggagcgtggacgcctgtttgtgggtgccgagaaccatgtggcctccctcaacctggacaacatcagcaagcgggccaagaagctggcctggccggcccctgtggaatggcgagaggagtgcaactgggcagggaaggacattggtactgagtgcatgaacttcgtgaagttgctgcatgcctacaaccgcacccatttgctggcctgtggcacgggagccttccacccaacctgtgcctttgtggaagtgggccaccgggcagaggagcccgtcctccggctggacccaggaaggatagaggatggcaaggggaagagtccttatgaccccaggcatcgggctgcctccgtgctggtgggggaggagctatactcaggggtggcagcagacctcatgggacgagactttaccatctttcgcagcctagggcaacgtccaagtctccgaacagagccacacgactcccgctggctcaatgagcccaagtttgtcaaggtattttggatcccggagagcgagaacccagacgacgacaaaatctacttcttctttcgtgagacggcggtagaggcggcgccggcactgggacgcctgtccgtgtcccgcgttggccagatctgccggaacgacgtgggcggccagcgcagcctggtcaacaagtggacgacgttcctgaaggcgcggctggtgtgctcggtgcccggcgtcgagggcgacacccacttcgatcagctccaggatgtgtttctgttgtcctcgcgggaccaccggaccccgctgctctatgccgtcttctccacgtccagcatcttccagggctctgcggtgtgcgtgtacagcatgaacgacgtgcgccgggccttcttgggaccctttgcacacaaggaggggcccatgcaccagtgggtgtcataccagggtcgcgtcccctacccgcggccaggcatgtgccccagcaagacctttggcaccttcagttccaccaaggacttcccagacgatgtcatccagtttgcgcggaaccaccccctcatgtacaactctgtcctgcccactggggggcgccctcttttcctacaagttggagccaattacaccttcactcaaattgccgcggaccgggttgcagccgctgacggacactatgacgtcctcttcattggcacagacgttggcacggtgctgaaggtgatctcggtccccaagggcagtaggcccagcgcagaggggctgctcctggaggagctgcacgtgtttgaggactcggccgctgtcaccagcatgcaaatttcttccaagaggcaccagctgtacgtagcctcgcggagcgcggtggcccagatcgcgttgcaccgctgcgctgcccacggccgcgtctgcaccgaatgctgtctggcgcgtgacccctactgcgcctgggacggggtcgcgtgcacgcgcttccagcccagtgccaagaggcggttccggcggcaagacgtaaggaatggcgaccccagcacgttgtgctccggagactcgtctcgtcccgcgctgctggaacacaaggtgttcggcgtggagggcagcagcgcctttctggagtgtgagccccgctcgctgcaggcgcgcgtggagtggactttccagcgcgcaggggtgacagcccacacccaggtgctggcagaggagcgcaccgagcgcaccgcccggggactactgctgcgcaggctgcggcgccgggactcgggcgtgtacttgtgcgccgccgtcgagcagggctttacgcaaccgctgcgtcgcctgtcgctgcacgtgttgagtgctacgcaggccgaacgactggcgcgggccgaggaggctgcgcccgccgcgccgccgggccccaaactctggtaccgggactttctgcagctggtggagccgggcggaggtggcagcgcgaactccctgcgcatgtgccgcccgcagcctgcgctgcagtcactgcccctggagtcgcggagaaagggccgtaaccggaggacccacgcccctgagcctcgcgctgagcgggggccgcgcagcgcaacgcactggtgaccagactgtccccacgccgggaaccaagcaggagacgacaggcgagagaggagccagacagaccctgaaaagaaggacgggttggggccgggcacattgggggtcaccggccgatggagacaccaaccgacaggccctggctgagggcagctgcgcgggcttatttattaacaggataacccttgaatgtagcagccccgggagggcggcacaggtcgggcgcaggattcagccggagggaagggacggggaagccgagctccagagcaacgaccagggccgaggaggtgcctggagtgcccaccctgggagacagaccccacctccttgggtagtgagcagtgagcagaaagctgtgaacaggctgggctgctggaggtggggcgaggcaggccgactgtactaaagtaacgcaataaacgcattatcagccaaagctggaatggccccagcagaaaaccccagaaaaaaaaaaaaaaaaaaaa

SEQ ID NO: 115 - protein, 748 aa, Homo sapiens
  ref <308>: DATABASE ACCESSION NUMBER: NCBI / NP_001005914.1
  ref <309>: DATABASE ENTRY DATE: 2014-06-14
  ref <313>: RELEVANT RESIDUES IN SEQ ID NO: (1)..(748)
MGRAGAAAVIPGLALLWAVGLGSAAPSPPRLRLSFQELQAWHGLQTFSLERTCCYQALLVDEERGRLFVGAENHVASLNLDNISKRAKKLAWPAPVEWREECNWAGKDIGTECMNFVKLLHAYNRTHLLACGTGAFHPTCAFVEVGHRAEEPVLRLDPGRIEDGKGKSPYDPRHRAASVLVGEELYSGVAADLMGRDFTIFRSLGQRPSLRTEPHDSRWLNEPKFVKVFWIPESENPDDDKIYFFFRETAVEAAPALGRLSVSRVGQICRNDVGGQRSLVNKWTTFLKARLVCSVPGVEGDTHFDQLQDVFLLSSRDHRTPLLYAVFSTSSIFQGSAVCVYSMNDVRRAFLGPFAHKEGPMHQWVSYQGRVPYPRPGMCPSKTFGTFSSTKDFPDDVIQFARNHPLMYNSVLPTGGRPLFLQVGANYTFTQIAADRVAAADGHYDVLFIGTDVGTVLKVISVPKGSRPSAEGLLLEELHVFEDSAAVTSMQISSKRHQLYVASRSAVAQIALHRCAAHGRVCTECCLARDPYCAWDGVACTRFQPSAKRRFRRQDVRNGDPSTLCSGDSSRPALLEHKVFGVEGSSAFLECEPRSLQARVEWTFQRAGVTAHTQVLAEERTERTARGLLLRRLRRRDSGVYLCAAVEQGFTQPLRRLSLHVLSATQAERLARAEEAAPAAPPGPKLWYRDFLQLVEPGGGGSANSLRMCRPQPALQSLPLESRRKGRNRRTHAPEPRAERGPRSATHW

SEQ ID NO: 116 - DNA, 1338 bp, Homo sapiens
  ref <308>: DATABASE ACCESSION NUMBER: NCBI / NM_005386.2
  ref <309>: DATABASE ENTRY DATE: 2014-05-05
  ref <313>: RELEVANT RESIDUES IN SEQ ID NO: (1)..(1338)
taggtggcgggcgggtacttaaggcgcggccaccgcggctgcggcagtgcgcccaacagcggactccgagaccagcggatctcggcaaaccctctttctcgaccacccacctaccattcttggaaccatggcggcagtggcggcggcctcggctgaactgctcatcatcggctggtacatcttccgcgtgctgctgcaggtgttcctggaatgctgcatttactgggtaggattcgcttttcgaaatcctccagggacacagcccattgcgagaagtgaggtgttcaggtactccctgcagaagctggcatacacggtgtcgcggaccgggcggcaggtgttgggggagcgcaggcagcgagcccccaactgaggccccagctcccagccctgggcggccgtatcatcaggtgctcctgtgcatctcggccagcacgggagccagtgccgcgcaggaatgtggggtcccctgtgttccctcgccagaggagcacttggcaaggtcagtgaggggccagtagacccccggagaagcagtaccgacaatgacgaagataccagatcccttcccaacccctttgcaccggtcccactaaggggcagggtcgagagaggaggggggatagggggagcagacccctgagatctgggcataggcaccgcattctgatctggacaaagtcgggacagcaccatcccagccccgaagccagggccatgccagcaggccccaccatggaaatcaaaacaccgcaccagccagcagaatggacattctgacatcgccagccgacgccctgaatcttggtgcagcaccaaccgcgtgcctgtgtggcgggactggagggcacagttgaggaaggagggtggttaagaaatacagtggggccctctcgctgtcccttgcccagggcacttgcattccagcctcgctgcatttgctctctcgattcccctttcctcctcactgcctcccaagcccaccctactccaaaataatgtgtcacttgatttggaactattcaagcagtaaaagtaaatgaatcccacctttactaaaacactttctctgaaccccccttgcccctcactgatcttgcttttccctggtctcatgcagttgtggtcaatattgtggtaatcgctaattgtactgattgtttaagtgtgcattagttgtgtctccccagctagattgtaagctcctggaggacagggaccacctctacaaaaaataaaaaaagtacctcccctgtctcgcacagtgtcccaggaccctgcggtgcagtagaggcgcaccaaaaaaaaaaaaaaaaaaaaaaaaaaaaaaaaaaaaaa

SEQ ID NO: 117 - protein, 81 aa, Homo sapiens
  ref <308>: DATABASE ACCESSION NUMBER: NCBI / NP_005377.1
  ref <309>: DATABASE ENTRY DATE: 2014-05-05
  ref <313>: RELEVANT RESIDUES IN SEQ ID NO: (1)..(81)
MAAVAAASAELLIIGWYIFRVLLQVFLECCIYWVGFAFRNPPGTQPIARSEVFRYSLQKLAYTVSRTGRQVLGERRQRAPN

SEQ ID NO: 118 - DNA, 2699 bp, Homo sapiens
  ref <308>: DATABASE ACCESSION NUMBER: NCBI / NM_015232.1
  ref <309>: DATABASE ENTRY DATE: 2014-01-26
  ref <313>: RELEVANT RESIDUES IN SEQ ID NO: (1)..(2699)
aagcccctccccttctctgggccttgatttcccctcctgctcagtggggacgttcttggtcctccttcttgcccactctacccagtcgccgagtctggcgaagcagagctgtctgggggtcaccgcagcaggagggaccgagcttagatacgaaaaaagacttctacacggcaagagccacagaaaggacgctccagctggctcagcagaggggcatctctccctttcaagaacaaaaggtggcaggtacccgggggccctggggcagaacgaggtaaattctgcacggacttccacatctaagaccccagaaatctccagccggctccctccgaccgaatgagaccgtgctgcaccagttctgctgcccagccgccgacgcctgctccgacctggcctcccaaagattgaaatgctagaacataagtacggcggtcacctggtgtcccggcgcgccgcttgcaccatccaaaccgccttccgccaataccagctcagcaagaacttcgagaaaatccgcaactcgcttctggagagccgcctgccacggcggatctccctgcgcaaggtgcggtcacccacggccgagagcctggcggccgagaaagcgctcatggagggctacggcctcgtggggctgccgctggtgcgctcgccctccctgccgcccaccttcgcaggcaccctcaccgagctggaggactccttcaccgagcaggtgcaatccctggccaagtccatcgacgacgcgctcagcacgtggagcctcaagaccatgtgctccctgcgggagagtggcgcttaccagctccaccaggccctgcaggcggccgcggggcccccaggcctggaggccgaggggcgggcgccggagagcgcgggccccgggcccggggatgacgccgcggagacccccggcctgcccccggcccacagcgggaccctcatgatggctttccgggacgtcacggtgcagatcgccaaccagaacatatccgtctcctcctccacggctctgtcggtggccaactgcctgggcgctcagacggtccaggcccccgcagagcccgcggcgggcaaggccgagcagggcgagacctctgggcgggaggccccggaagcccccgccgtgggccgggaggacgcgtcagccgaggactcatgcgcagaggctgcggctagtggggcggcggatggggccacagcccccaaaacagaggaggaagaggaggaggaggagacggcggaggtggggagaggggccgaggccgaggcaggcgacttggagcagctgagcagcagcagcacgtccaccaagtccgccaagtcaggctcggaggcgtcggcctccgcctccaaggacgccctgcaggccatgatcctgagcctgccgcgctaccactgcgagaacccagccagctgcaagtcgcccacgctctccaccgacaccctgcgcaagcggctctaccgcatcggcctcaacctcttcaacataaaccccgacaagggcatccagttcctgatctcacgcggcttcatcccggacacccccatcggtgtggcccatttcctcctccagcgaaagggcctcagccgccagatgattggagagttcctgggcaacagcaagaagcagttcaaccgcgacgtgctggactgcgtggtggacgagatggacttctccagcatggagctggacgaggccctgcgcaagttccaggcacacatccgtgtgcagggggaggctcagaaggtggagcggctcattgaggccttcagccagcgctactgcatgtgcaaccccgaagtggttcagcagttccacaaccccgacaccatcttcatcctcgccttcgccatcatcctcctcaacaccgacatgtacagccccaacatcaagcctgaccggaagatgatgctggaggacttcatccgaaaccttcgaggtgtggacgatggcgctgacatccccagggagctggtggtaggcatctatgagaggatacagcagaaggagctcaagtccaatgaggaccacgtcacgtacgtcaccaaggtggagaagtccattgtgggcatgaagacagtgctgtccgtgccccaccgccgcctggtgtgctgcagccggctcttcgaggtgacggatgtgaacaagctgcagaagcaggcagcgcatcagagggaggtgttcctcttcaatgacctgctggtgattctcaaactttgcccgaagaagaagagctcctccacgtacaccttttgcaagtcagttggcctgctgggcatgcagttccagctctttgagaacgagtattactctcatggcatcacactggtgaccccgctctcgggctccgagaagaagcaggtgctgcatttctgtgccctgggctcggacgagatgcagaagttcgtggaggacctgaaggagtccattgctgaggtgacggagctggagcagatccgaatagagtgggagctggagaagcagcagggaacaaagacactctccttcaagccctgcggagcccagggggacccacagtcaaagcaaggatcgccgacagccaaaagggaagccgcgctcagggagaggccggcggagagcacggtggaggtattaatcaatgcctccccagcccgactcaccattttaccaatttcaagagatacaattaaaagttactgctagcatgggt

SEQ ID NO: 119 - protein, 759 aa, Homo sapiens
  ref <308>: DATABASE ACCESSION NUMBER: NCBI / NP_056047.1
  ref <309>: DATABASE ENTRY DATE: 2014-01-26
  ref <313>: RELEVANT RESIDUES IN SEQ ID NO: (1)..(759)
MLEHKYGGHLVSRRAACTIQTAFRQYQLSKNFEKIRNSLLESRLPRRISLRKVRSPTAESLAAEKALMEGYGLVGLPLVRSPSLPPTFAGTLTELEDSFTEQVQSLAKSIDDALSTWSLKTMCSLRESGAYQLHQALQAAAGPPGLEAEGRAPESAGPGPGDDAAETPGLPPAHSGTLMMAFRDVTVQIANQNISVSSSTALSVANCLGAQTVQAPAEPAAGKAEQGETSGREAPEAPAVGREDASAEDSCAEAAASGAADGATAPKTEEEEEEEETAEVGRGAEAEAGDLEQLSSSSTSTKSAKSGSEASASASKDALQAMILSLPRYHCENPASCKSPTLSTDTLRKRLYRIGLNLFNINPDKGIQFLISRGFIPDTPIGVAHFLLQRKGLSRQMIGEFLGNSKKQFNRDVLDCVVDEMDFSSMELDEALRKFQAHIRVQGEAQKVERLIEAFSQRYCMCNPEVVQQFHNPDTIFILAFAIILLNTDMYSPNIKPDRKMMLEDFIRNLRGVDDGADIPRELVVGIYERIQQKELKSNEDHVTYVTKVEKSIVGMKTVLSVPHRRLVCCSRLFEVTDVNKLQKQAAHQREVFLFNDLLVILKLCPKKKSSSTYTFCKSVGLLGMQFQLFENEYYSHGITLVTPLSGSEKKQVLHFCALGSDEMQKFVEDLKESIAEVTELEQIRIEWELEKQQGTKTLSFKPCGAQGDPQSKQGSPTAKREAALRERPAESTVEVLINASPARLTILPISRDTIKSYC

SEQ ID NO: 120 - DNA, 2735 bp, Homo sapiens
  ref <308>: DATABASE ACCESSION NUMBER: NCBI / NM_002427.3
  ref <309>: DATABASE ENTRY DATE: 2014-05-03
  ref <313>: RELEVANT RESIDUES IN SEQ ID NO: (1)..(2735)
acaacagtccccaggcatcaccattcaagatgcatccaggggtcctggctgccttcctcttcttgagctggactcattgtcgggccctgccccttcccagtggtggtgatgaagatgatttgtctgaggaagacctccagtttgcagagcgctacctgagatcatactaccatcctacaaatctcgcgggaatcctgaaggagaatgcagcaagctccatgactgagaggctccgagaaatgcagtctttcttcggcttagaggtgactggcaaacttgacgataacaccttagatgtcatgaaaaagccaagatgcggggttcctgatgtgggtgaatacaatgttttccctcgaactcttaaatggtccaaaatgaatttaacctacagaattgtgaattacacccctgatatgactcattctgaagtcgaaaaggcattcaaaaaagccttcaaagtttggtccgatgtaactcctctgaattttaccagacttcacgatggcattgctgacatcatgatctcttttggaattaaggagcatggcgacttctacccatttgatgggccctctggcctgctggctcatgcttttcctcctgggccaaattatggaggagatgcccattttgatgatgatgaaacctggacaagtagttccaaaggctacaacttgtttcttgttgctgcgcatgagttcggccactccttaggtcttgaccactccaaggaccctggagcactcatgtttcctatctacacctacaccggcaaaagccactttatgcttcctgatgacgatgtacaagggatccagtctctctatggtccaggagatgaagaccccaaccctaaacatccaaaaacgccagacaaatgtgacccttccttatcccttgatgccattaccagtctccgaggagaaacaatgatctttaaagacagattcttctggcgcctgcatcctcagcaggttgatgcggagctgtttttaacgaaatcattttggccagaacttcccaaccgtattgatgctgcatatgagcacccttctcatgacctcatcttcatcttcagaggtagaaaattttgggctcttaatggttatgacattctggaaggttatcccaaaaaaatatctgaactgggtcttccaaaagaagttaagaagataagtgcagctgttcactttgaggatacaggcaagactctcctgttctcaggaaaccaggtctggagatatgatgatactaaccatattatggataaagactatccgagactaatagaagaagacttcccaggaattggtgataaagtagatgctgtctatgagaaaaatggttatatctattttttcaacggacccatacagtttgaatacagcatctggagtaaccgtattgttcgcgtcatgccagcaaattccattttgtggtgttaagtgtctttttaaaaattgttatttaaatcctgaagagcatttggggtaatacttccagaagtgcggggtaggggaagaagagctatcaggagaaagcttggttctgtgaacaagcttcagtaagttatctttgaatatgtagtatctatatgactatgcgtggctggaaccacattgaagaatgttagagtaatgaaatggaggatctctaaagagcatctgattcttgttgctgtacaaaagcaatggttgatgatacttcccacaccacaaatgggacacatggtctgtcaatgagagcataatttaaaaatatatttataaggaaattttacaagggcataaagtaaatacatgcatataatgaataaatcattcttactaaaaagtataaaatagtatgaaaatggaaatttgggagagccatacataaaagaaataaaccaaaggaaaatgtctgtaataatagactgtaacttccaaataaataattttcattttgcactgaggatattcagatgtatgtgcccttcttcacacagacactaacgaaatatcaaagtcattaaagacaggagacaaaagagcagtggtaagaatagtagatgtggcctttgaattctgtttaattttcacttttggcaatgactcaaagtctgctctcatataagacaaatattcctttgcatattataaaggataaagaaggatgatgtctttttattaaaatatttcaggttcttcagaagtcacacattacaaagttaaaattgttatcaaaatagtctaaggccatggcatccctttttcataaattatttgattatttaagactaaaagttgcattttaaccctattttacctagctaattatttaattgtccagtttgtcttggatatataggctattttctaaagacttgtatagcatgaaataaaatatatcttataaagtggaagtatgtatattaaaaaagagacatccaaatttttttttaaagcagtctactagattgtgatcccttgagatatggaaggatgcctttttttctctgcatttaaaaaaatcccccagcacttcccacagtgcctattgatacttggggagggtgcttggcacttattgaatatatgatcggccatcaagggaagaactattgtgctcagagacactgttgataaaaactcaggcaaagaaaatgaaatgcatatttgcaaagtgtattaggaagtgtttatgttgtttataataaaaatatattttcaacagacaaaaaaaaaaaaaaaaaa

SEQ ID NO: 121 - protein, 471 aa, Homo sapiens
  ref <308>: DATABASE ACCESSION NUMBER: NCBI / NP_002418.1
  ref <309>: DATABASE ENTRY DATE: 2014-05-03
  ref <313>: RELEVANT RESIDUES IN SEQ ID NO: (1)..(471)
MHPGVLAAFLFLSWTHCRALPLPSGGDEDDLSEEDLQFAERYLRSYYHPTNLAGILKENAASSMTERLREMQSFFGLEVTGKLDDNTLDVMKKPRCGVPDVGEYNVFPRTLKWSKMNLTYRIVNYTPDMTHSEVEKAFKKAFKVWSDVTPLNFTRLHDGIADIMISFGIKEHGDFYPFDGPSGLLAHAFPPGPNYGGDAHFDDDETWTSSSKGYNLFLVAAHEFGHSLGLDHSKDPGALMFPIYTYTGKSHFMLPDDDVQGIQSLYGPGDEDPNPKHPKTPDKCDPSLSLDAITSLRGETMIFKDRFFWRLHPQQVDAELFLTKSFWPELPNRIDAAYEHPSHDLIFIFRGRKFWALNGYDILEGYPKKISELGLPKEVKKISAAVHFEDTGKTLLFSGNQVWRYDDTNHIMDKDYPRLIEEDFPGIGDKVDAVYEKNGYIYFFNGPIQFEYSIWSNRIVRVMPANSILWC

SEQ ID NO: 122 - DNA, 2812 bp, Homo sapiens
  ref <308>: DATABASE ACCESSION NUMBER: NCBI / NM_000787.3
  ref <309>: DATABASE ENTRY DATE: 2014-05-03
  ref <313>: RELEVANT RESIDUES IN SEQ ID NO: (1)..(2812)
accccagccatgcccgccctcagtcgctgggccagcctgcccggccccagcatgcgggaggcagccttcatgtacagcacagcagtggccatcttcctggtcatcctggtggccgcactgcagggctcggctccccgtgagagccccctcccctatcacatccccctggacccggaggggtccctggagctctcatggaatgtcagctacacccaggaggccatccatttccagctcctggtgcggaggctcaaggctggcgtcctgtttgggatgtccgaccgtggcgagcttgagaacgcagatctcgtggtgctctggaccgatggggacactgcctattttgcggacgcctggagtgaccagaaggggcagatccacctggatccccagcaggactaccagctgctgcaggtgcagaggaccccagaaggcctgaccctgcttttcaagaggccctttggcacctgcgaccccaaggattacctcattgaagacggcactgtccacttggtctacgggatcctggaggagccgttccggtcactggaggccatcaacggctcgggcctgcagatggggctgcagagggtgcagctcctgaagcccaatatccccgaaccggagttgccctcagacgcgtgcaccatggaggtccaagctcccaatatccagatccccagccaggagaccacgtactggtgctacattaaggagcttccaaagggcttctctcggcaccacattatcaagtacgagcccatcgtcaccaagggcaatgaggcccttgtccaccacatggaagtcttccagtgcgcccccgagatggacagcgtcccccacttcagcgggccctgcgactccaagatgaaacccgaccgcctcaactactgccgccacgtgctggccgcctgggccctgggtgccaaggcattttactacccagaggaagccggccttgccttcgggggtccagggtcctccagatatctccgcctggaagttcactaccacaacccactggtgatagaaggacgaaacgactcctcaggcatccgcttgtactacacagccaagctgcggcgcttcaacgcggggatcatggagctgggactggtgtacacgccagtgatggccattccaccacgggagaccgccttcatcctcactggctactgcacggacaagtgcacccagctggcactgcctccctccgggatccacatcttcgcctctcagctccacacacacctgactgggagaaaggtggtcacagtgctggtccgggacggccgggagtgggagatcgtgaaccaggacaatcactacagccctcacttccaggagatccgcatgttgaagaaggtcgtgtcggtccatccgggagatgtgctcatcacctcctgcacgtacaacacagaagaccgggagctggccacagtggggggcttcgggatcctggaggagatgtgtgtcaactacgtgcactactacccccagacgcagctggagctctgcaagagcgctgtggacgccggcttcctgcagaagtacttccacctcatcaacaggttcaacaacgaggatgtctgcacctgccctcaggcgtccgtgtctcagcagttcacctctgttccctggaactccttcaaccgcgacgtactgaaggccctgtacagcttcgcgcccatctccatgcactgcaacaagtcctcagccgtccgcttccagggtgaatggaacctgcagcccctgcccaaggtcatctccacactggaagagcccaccccacagtgccccaccagccagggccgaagccctgctggccccaccgttgtcagcattggtgggggcaaaggctgaggggggacctactcctccccctcctccatgctgtccctgtgggctcacaccggcactgtgcactctactctgcgacgatccccatggaacagccctgcacgcccaggatgaaggggccagaccacgcccctgcctgagaccacggtccaatccagccttcttcccccagggtcccctgcatggctgagagggtgtgggtgccctgttgacctaccctggaccgagtggaccacgacctcgtccatttaaacccggctgactcagtgcagggacagcctgcacagtggtccagggtccagccctccgccagccctgttccgcctcactgggtgtggcctggcttctgggacaggcaccatgctgggccggggtgtggaatcaccgggaacgcccccgcccccgccccgctgctcccggtgtgcagcgggtgcgggtgccgcttaaacatttccctgctgagtggctcgtgtttcacagtgggcggcttccctgcgacggaggcaggaccaggcatttagctagttagagactcgcctgggaaattgctccattcctgagtaaacagatattttcgcccacctaaagggaagccctgacaacaactatcaccaaaagacgaggcggcaaagatccagcggggcttctgggcgccggttccacgtggggtggaattattagcaccagcttgcttctctgccggtggggccagcgctgaacagaccggggtggagtcagggctgtgctttccgcgtggttctgccacttagggagtgtgccttgggcgggccatttcacattcctgaccctcacttttctcatctgtaaaaccaggctgatgccgtgcgggctaatgagccaataaagctcacacttgggctggcacccactggaggtgggaaaaaaaaaaaaaaaaaaaaaaaaaaaaaaaaaaaaaaaaaaaaaaaaaaaa

SEQ ID NO: 123 - protein, 617 aa, Homo sapiens
  ref <308>: DATABASE ACCESSION NUMBER: NCBI / NP_000778.3
  ref <309>: DATABASE ENTRY DATE: 2014-05-03
  ref <313>: RELEVANT RESIDUES IN SEQ ID NO: (1)..(617)
MPALSRWASLPGPSMREAAFMYSTAVAIFLVILVAALQGSAPRESPLPYHIPLDPEGSLELSWNVSYTQEAIHFQLLVRRLKAGVLFGMSDRGELENADLVVLWTDGDTAYFADAWSDQKGQIHLDPQQDYQLLQVQRTPEGLTLLFKRPFGTCDPKDYLIEDGTVHLVYGILEEPFRSLEAINGSGLQMGLQRVQLLKPNIPEPELPSDACTMEVQAPNIQIPSQETTYWCYIKELPKGFSRHHIIKYEPIVTKGNEALVHHMEVFQCAPEMDSVPHFSGPCDSKMKPDRLNYCRHVLAAWALGAKAFYYPEEAGLAFGGPGSSRYLRLEVHYHNPLVIEGRNDSSGIRLYYTAKLRRFNAGIMELGLVYTPVMAIPPRETAFILTGYCTDKCTQLALPPSGIHIFASQLHTHLTGRKVVTVLVRDGREWEIVNQDNHYSPHFQEIRMLKKVVSVHPGDVLITSCTYNTEDRELATVGGFGILEEMCVNYVHYYPQTQLELCKSAVDAGFLQKYFHLINRFNNEDVCTCPQASVSQQFTSVPWNSFNRDVLKALYSFAPISMHCNKSSAVRFQGEWNLQPLPKVISTLEEPTPQCPTSQGRSPAGPTVVSIGGGKG

SEQ ID NO: 124 - DNA, 5507 bp, Homo sapiens
  ref <308>: DATABASE ACCESSION NUMBER: NCBI / NM_015130.2
  ref <309>: DATABASE ENTRY DATE: 2014-05-03
  ref <313>: RELEVANT RESIDUES IN SEQ ID NO: (1)..(5507)
gcggccgcgggctctcgcggggcggcgacgccgcggggaggatgctgcttgccgcgcccgcgtcctcaccgtcctcccgggccgcctgctggggctttgttgtggcccggacgccgcgggccaccccctgaagtcgcctgccgccgccgccgccgcacctagcggacgggcgggcgggcgcgcgtgtgcccaggagtgcgcgcctgtcgcggtggtgggtgcaggactggacccacgggcccattgtgcgcccgcccgcggcagccaggaccatgtgggtgaacccggaggaggtgttgctggccaacgcgctgtggatcaccgagagggccaacccatacttcatcctgcagcggaggaagggccacgccggcgatggaggcggcggcggcggactggcgggcctgctggtgggtacccttgatgttgtgttggactccagcgcccgggtcgctccttaccgaatcttgtaccagactccagactccctggtctactggaccatcgcctgtggtggttccaggaaagaaatcactgaacactgggaatggcttgagcaaaatctcttgcagacactctccatctttgaaaatgagaatgatatcaccacatttgtgagaggaaaaatacagggcatcattgcagaatacaacaaaatcaatgatgtaaaggaagatgatgacacggagaagtttaaagaagccattgtgaaatttcataggctgtttgggatgccagaggaagagaaactcgtcaactattactcttgcagctattggaaggggaaggtcccccgtcagggttggatgtacctcagcattaaccacctttgcttttattcttttcttatgggaagggaagcgaaactggtcatccggtgggtagacatcactcagcttgagaagaatgccaccctgcttctgcctgatgtgatcaaagtgagcacacggtccagtgagcatttcttctctgtattcctcaacatcaacgagaccttcaagttaatggagcagcttgccaacatagccatgaggcaactcttagacaatgagggatttgaacaagatcgatccctgcccaaactcaaaaggaaatctcctaaaaaagtgtctgctctaaaacgtgatcttgatgccagggcaaagagtgagagataccgtgcacttttccggctgcccaaagatgaaaaattagatggccacacagactgcactctctggactccatttaacaaaatgcacattttggggcagatgtttgtgtccacaaattacatctgttttaccagcaaggaggagaacttatgtagcctcattatcccgctccgtgaggtgacaattgtggaaaaggcagacagctccagtgtgctccccagtcccttatccatcagcacccgaaacaggatgaccttcctatttgccaacttgaaagatagagactttctagtgcagaggatctcagatttcctgcaacagactacttccaaaatatattctgacaaggagtttgcaggaagttacaacagttcagatgatgaggtgtactctcgacccagcagcctcgtctcctccagcccccagagaagcacgagctctgatgctgatggagagcgccagtttaacctaaatggcaacagcgtccccacagccacacagaccctgatgaccatgtatcggcggcggtctcccgaggagttcaacccgaaattggccaaagagtttctgaaagagcaagcctggaagattcactttgctgagtatgggcaagggatctgcatgtaccgcacagagaaaacgcgggagctggtgttgaagggcatcccggagagcatgcgtggggagctctggctgctgctgtcaggtgccatcaatgagaaggccacacatcctgggtactatgaagacctagtggagaagtccatggggaagtataatctcgccacggaggagattgagagggatttacaccgctcccttccagaacacccagcttttcagaatgaaatgggcattgctgcactaaggagagtcttaacagcttatgcttttcgaaatcccaacatagggtattgccaggccatgaatattgtcacttcagtgctgctgctttatgccaaagaggaggaagctttctggctgcttgtggctttgtgtgagcgcatgctcccagattactacaacaccagagttgtgggtgcactggtggaccaaggtgtctttgaggagctagcacgagactacgtcccacagctgtacgactgcatgcaagacctgggcgtgatttccaccatctccctgtcttggttcctcacactatttctcagtgtgatgccttttgagagtgcagttgtggttgttgactgtttcttctatgaaggaattaaagtgatattccagttggccctagctgtgctggatgcaaatgtggacaaactgttgaactgcaaggatgatggggaggccatgaccgttttgggaaggtatttagacagtgtgaccaataaagacagcacactgcctcccattcctcacctccactccttgctcagcgatgatgtggaaccttaccctgaggtagacatctttagactcatcagaacttcctacgagaaattcggaactatccgggcagatttgattgaacagatgagattcaaacagagactgaaagtgatccagacgctggaggatactacgaaacgcaacgtggtacgaaccattgtgacagaaacttcctttaccattgatgagctggaagaactttatgctcttttcaaggcagaacatctcaccagctgctactggggcgggagcagcaacgcgctggaccggcatgaccccagcctgccctacctggaacagtatcgcattgacttcgagcagttcaagggaatgtttgctcttctctttccttgggcatgtggaactcactctgacgttctggcctcccgcttgttccagttattagatgaaaatggagactctttgattaacttccgggagtttgtctctgggctaagtgctgcatgccatggggacctcacagagaagctcaaactcctgtacaaaatgcacgtcttgcctgagccatcctctgatcaagatgaaccagattctgcttttgaagcaactcagtacttctttgaagatattaccccagaatgtacacatgttgttggattggatagcagaagcaaacagggtgcagatgatggctttgttacggtgagcctaaagccagacaaagggaagagagcaaattcccaagaaaatcgtaattatttgagactgtggactccagaaaataaatctaagtcaaagaatgcaaaggatttacccaaattaaatcaggggcagttcattgaactgtgtaagacaatgtataacatgttcagcgaagaccccaatgagcaggagctgtaccacgccacggcagcagtgaccagcctcctgctggagattggggaggtcggcaagttgttcgtggcccagcctgcaaaggagggcgggagcggaggcagtgggccgtcctgccaccagggcatcccaggcgtgctcttccccaagaaagggccaggccagccttacgtggtggagtctgttgagcccctgccggccagcctggcccccgacagcgaggaacactcccttggaggacaaatggaggacatcaagctggaggactcctcgccccgggacaacggggcctgctcctccatgctgatctctgacgacgacaccaaggacgacagctccatgtcctcatactcggtgctgagtgccggctcccacgaggaggacaagctgcactgcgaggacatcggagaggacacggtcctggtgcggagcggccagggcacggcggcactgccccggagcaccagcctggaccgggactgggccatcaccttcgagcagttcctggcctccctcttaactgagcctgccctggtcaagtactttgacaagcccgtgtgcatgatggccaggattaccagtgcaaaaaacatccggatgatgggcaagcccctcacctcggccagtgactatgaaatctcggccatgtccggctgacacgggcgccttcccgggggagtgggaggagagggaggggagggattttttatgttcttctgtgttgagttttttctttctttcttttaaattaaatatttattagtacctggcttgaagcctagtgttttcataatgtaattcaatgaaaactgttggagaaatatttaaacacctcaatgtaggtacattacactcttgttgcggggaggggatttaccagaatacagtttatttcgtgaattctaaaaaacaaaaagatgaatctgtcagtgatatgtgtgtattataacttattaatcttgctgttgagctgtatacatggtttaaaaaatagtactgtttaatgctaagtaaggcagcagtcatttgtgtattcaggctttttaaataaaattagagctgtaaggaaaatgaaaagccacaaatgcaagactgttcttaaatggaaggcatagtcagcgagggtaaatcctataccactttaggaagtattaaaaatatttttaagatttgaaatatatttcatagaagtcctctattcaaaatcatattccacagatgttccccttcaaagggaaaacatttggggttctaaacagttatgaaagtaagtgatttttacatgattccagaataacacttgtattgaccaatttagacagataccagaccaattttgcatttaagaaattgttctgattatttacgtcaactcattagaattcagtgaaaagtaacagtcttttgtcacagagaatctgaaagtagcagcaaagacagagggctcatgacaggtttttgcttttgctttgcttttgtttttgaaagagtaaaagtactgatgcttctgatactggatgtttagcttcttactgcaaaaacataagtaaaacagtcaactttaccatttccgtattctccatagattgaagaaatttataccacatatcgcatatgaccatctttccatcaaatcaatgtagagataatgtaaactgaaaaaaaatctgcaagataatgtaactgaatgttttaaaaacagaacttgtcactttatataaaagaatagtatgctctatttcctgaatggatgtggaaatgaaagctagcgcacctgcactttgaattcttgcttcttttttattactgttatgattttgctttttacagatgttggacgattttttcttctgattgttgaattcataatcatggtctcatttcctttgcttctttggaatatttctttcaacacattcctttattttattatacattgtgtcctttttttagctattgctgctgttgttttttattctatttacaggatgatttttaaactgtcaaatgaagtagtgttaacctcaaataggctaaatgtgaacaaataaaatacagcaaatactcagaaaaaaaaaaaaaaaaaaaaaa

SEQ ID NO: 125 - protein, 1266 aa, Homo sapiens
  ref <308>: DATABASE ACCESSION NUMBER: NCBI / NP_055945.2
  ref <309>: DATABASE ENTRY DATE: 2014-03-19
  ref <313>: RELEVANT RESIDUES IN SEQ ID NO: (1)..(1266)
MWVNPEEVLLANALWITERANPYFILQRRKGHAGDGGGGGGLAGLLVGTLDVVLDSSARVAPYRILYQTPDSLVYWTIACGGSRKEITEHWEWLEQNLLQTLSIFENENDITTFVRGKIQGIIAEYNKINDVKEDDDTEKFKEAIVKFHRLFGMPEEEKLVNYYSCSYWKGKVPRQGWMYLSINHLCFYSFLMGREAKLVIRWVDITQLEKNATLLLPDVIKVSTRSSEHFFSVFLNINETFKLMEQLANIAMRQLLDNEGFEQDRSLPKLKRKSPKKVSALKRDLDARAKSERYRALFRLPKDEKLDGHTDCTLWTPFNKMHILGQMFVSTNYICFTSKEENLCSLIIPLREVTIVEKADSSSVLPSPLSISTRNRMTFLFANLKDRDFLVQRISDFLQQTTSKIYSDKEFAGSYNSSDDEVYSRPSSLVSSSPQRSTSSDADGERQFNLNGNSVPTATQTLMTMYRRRSPEEFNPKLAKEFLKEQAWKIHFAEYGQGICMYRTEKTRELVLKGIPESMRGELWLLLSGAINEKATHPGYYEDLVEKSMGKYNLATEEIERDLHRSLPEHPAFQNEMGIAALRRVLTAYAFRNPNIGYCQAMNIVTSVLLLYAKEEEAFWLLVALCERMLPDYYNTRVVGALVDQGVFEELARDYVPQLYDCMQDLGVISTISLSWFLTLFLSVMPFESAVVVVDCFFYEGIKVIFQLALAVLDANVDKLLNCKDDGEAMTVLGRYLDSVTNKDSTLPPIPHLHSLLSDDVEPYPEVDIFRLIRTSYEKFGTIRADLIEQMRFKQRLKVIQTLEDTTKRNVVRTIVTETSFTIDELEELYALFKAEHLTSCYWGGSSNALDRHDPSLPYLEQYRIDFEQFKGMFALLFPWACGTHSDVLASRLFQLLDENGDSLINFREFVSGLSAACHGDLTEKLKLLYKMHVLPEPSSDQDEPDSAFEATQYFFEDITPECTHVVGLDSRSKQGADDGFVTVSLKPDKGKRANSQENRNYLRLWTPENKSKSKNAKDLPKLNQGQFIELCKTMYNMFSEDPNEQELYHATAAVTSLLLEIGEVGKLFVAQPAKEGGSGGSGPSCHQGIPGVLFPKKGPGQPYVVESVEPLPASLAPDSEEHSLGGQMEDIKLEDSSPRDNGACSSMLISDDDTKDDSSMSSYSVLSAGSHEEDKLHCEDIGEDTVLVRSGQGTAALPRSTSLDRDWAITFEQFLASLLTEPALVKYFDKPVCMMARITSAKNIRMMGKPLTSASDYEISAMSG

SEQ ID NO: 126 - DNA, 683 bp, Homo sapiens
  ref <308>: DATABASE ACCESSION NUMBER: NCBI / NM_014624.3
  ref <309>: DATABASE ENTRY DATE: 2014-03-02
  ref <313>: RELEVANT RESIDUES IN SEQ ID NO: (1)..(683)
ctgcgcagatgaggggagactcgtcaccaggcgtgcagtgggcactgctgggctcccccatcccgtcctaacccggaacagccccgggcaggaggcgtggaaagtcgagggggtaaaccgcgaatgtgcgttgtgtaagccacggcgcagggtggggcgcgggcgggacttgggcgggcggggtgggcttggccgagctggcctccggggcaccgaccgctataaggccagtcggactgcgacacagcccatcccctcgaccgctcgcgtcgcatttggccgcctccctaccgctccaagcccagccctcagccatggcatgccccctggatcaggccattggcctcctcgtggccatcttccacaagtactccggcagggagggtgacaagcacaccctgagcaagaaggagctgaaggagctgatccagaaggagctcaccattggctcgaagctgcaggatgctgaaattgcaaggctgatggaagacttggaccggaacaaggaccaggaggtgaacttccaggagtatgtcaccttcctgggggccttggctttgatctacaatgaagccctcaagggctgaaaataaatagggaagatggagacaccctctgggggtcctctctgagtcaaatccagtggtgggtaattgtacaataaattttttttggtcaaattt

SEQ ID NO: 127 - protein, 90 aa, Homo sapiens
  ref <308>: DATABASE ACCESSION NUMBER: NCBI / NP_055439.1
  ref <309>: DATABASE ENTRY DATE: 2014-03-02
  ref <313>: RELEVANT RESIDUES IN SEQ ID NO: (1)..(90)
MACPLDQAIGLLVAIFHKYSGREGDKHTLSKKELKELIQKELTIGSKLQDAEIARLMEDLDRNKDQEVNFQEYVTFLGALALIYNEALKG

SEQ ID NO: 128 - DNA, 3388 bp, Homo sapiens
  ref <308>: DATABASE ACCESSION NUMBER: NCBI / NM_178496.3
  ref <309>: DATABASE ENTRY DATE: 2014-02-02
  ref <313>: RELEVANT RESIDUES IN SEQ ID NO: (1)..(3388)
agttggctctacgaccgccgttgccgctgccagagagggccagggcagggcagggacgcgcagcatcggggcgggcgtggggccggagaaaagggtgtcggggccacacacgcaccctcgctgcagtccagctcctcccgaagctcgcacgcccagagcgcacggagcgggggactgcccgcccagacgcccgcccgccaacccgcccacgagccggggccaaagcctgggagcctgcgaggggaggaggcccaggggggcggggtggggggcgggggtgggtgccgcgctgccgcggagctgctactcggcgcgttttgcatgaagatggcggctcccaccgccaacaaggcagcctccctgggctgtaacaacaagcctgcgttcccggagctggatttcaggtcgggagctcgggtggaggaattgaacaaactcatccaagaatttacgaagcacgaccagcgggaatacgacgaccagagagcgctggagattcacacagccaaggatttcatcttttccatgctgggaatggtgcaaaagctggaccaaaagcttccagtggctaatgaatacctgttgctctctggaggtgtccgggaaggcgtggtggacctggacttagatgagcttaatgtctatgcccggggtactgactatgatatggactttaccctcttggtgccagccctcaagctgcatgaccgtaatcagcctgtgacactcgacatgcgccactcagccttgtgccactcttggctgagccttcggctctttgatgaggggacaatcagtaaatggaaagactgctgcaccattgtagatcacatcaatggtgccaccaactacttcttctcacctaccaaagtggctgactggttctatgactctatcagcattgtcctatcagaaatacagaagaaaccccagcgagggatgccaaaggtagaaaaggtggaaaaaaatgggaccatcatctccatcattctgggtgtagggagtagtcgcatgttgtatgatattgtccctgtggtatctttcaaaggttggcctgcagtggcccagagctggctcatggagaaccacttttgggatgggaagattactgaggaagaggtcatcagtgggttttacttggtgcctgcttgctcctacaagggtaagaaggacaatgaatggcggctgtcctttgccaggagcgaggtgcagttgaagaagtgcatctccagcagcctcatgcaggcctatcaggcctgcaaagccatcatcattaaactgctgtcccggcccaaggctattagcccctatcacctgcggagcatgatgctctgggcctgcgacagacttcctgccaactacttggctcaagaagactatgcagcccactttttgctgggcctcatcgatgacctgcaacactgtctggtcaacaagatgtgccccaattatttcatccctcagtgcaacatgctggaacatctgtctgaggagacagtcatgcttcacgcccggaagctgtcctctgtgcgctcagacccggcagagcacttgcgcaccgccattgagcatgtcaaggcagccaaccggctgacactggagctccagaggcgaggtagcaccaccagcatcccctctccacagtctgacggaggggaccccaaccagcctgatgaccgtttggcaaaaaaactgcagcagctagtgactgagaacccgggaaagtcaatctctgtctttatcaatcctgacgatgtcacaaggccccatttcagaattgatgacaaatttttctgagtgttagctgacttttttttttcctgattcttaaactctgataatgtgtcgtgtggtttgtgatgctatctttctgttttttacatatccagcctagattggatttgttaagaacaaattttaagtttcctggttctgcaggatggtgcaggctctgaaacagtatattactatttcatattctgcctctgatttcgttgtttactttttgtagttattgtcatgctctttagtttgttggagttttttttctttttaaggagatcttaagccatagatgaaaatgcccatgaatcctcttgcttttttctgtttcatacttggtgcaaatttgttcatgggtatggggaaacaaatctctttctgatgcttaacgattctatcctattatttttattattttgtttttgtcttttttcttatgagctttcaccactactgatatttgagaatcatatgaacctgggaactacttggcatgttagctggatttatttattttggccagtgaccagagtagtttccccccttttccaccaaacaatgtaaactttgaaagtgataatactacaaattgtgttttggagcaacttcattgaatgtaattgtcctcaaatcagagaacactgggtggtttgaagggtgtctttgacagttttccaagcagaattaaggtttccaaatgttaattttagcatatgtaattatttgaagccttatttaaatcctattaaagaacataccattataattattatttgcactaatctttgccattgtcagaattgcaaagtgtgtttcaatataaattaacaaccactctcgaaattctatcattttttcattttgcccatttctatcagtgaaatgattctttgcatttgcttagttctccttcagttgtggggtcctgctttgccctctttgatattcctggttcctgtcttactgagagaagttgttaaagctttatacatgttgaccccatctaaagctggggaaaatatacacttgatgaagtaggtgtctttgtatttatttcttttggggtcatagaggtaagcttttttgtaaaatctctactcttcctgagagttttgagaaaaactggcaggaagaacttataatccccaaatagaagataccacgtctgttcaaaagcaggtattgctatagagcagcacccaggaaatatctgtgggtggcagccttggtatagaggtgtcctgtcttcatgagtgaagttacttgcctgattaggtgctggaaggtattggctccctgttttggtgtggactcatggcaagctggtgtttaagaggtcaggaggcctgctgatctttcaaaggacacccatgatgtctactcatagaaagggcaagtaacgtgttcattttggtcttgaatgtccaaactcaagggttggattttggccaattgaaatcagacatatgcgatcttgggtttttgcatggaaattaatgtaatgcttataaatgaaaaatgaaaacatttcaaccatctaagtcaaacacaaaaataataaaaaaagaaacatactggccttgaaaaaaaaaaaaaaaaaaaaaaa

SEQ ID NO: 129 - protein, 491 aa, Homo sapiens
  ref <308>: DATABASE ACCESSION NUMBER: NCBI / NP_848591.2
  ref <309>: DATABASE ENTRY DATE: 2014-02-02
  ref <313>: RELEVANT RESIDUES IN SEQ ID NO: (1)..(491)
MKMAAPTANKAASLGCNNKPAFPELDFRSGARVEELNKLIQEFTKHDQREYDDQRALEIHTAKDFIFSMLGMVQKLDQKLPVANEYLLLSGGVREGVVDLDLDELNVYARGTDYDMDFTLLVPALKLHDRNQPVTLDMRHSALCHSWLSLRLFDEGTISKWKDCCTIVDHINGATNYFFSPTKVADWFYDSISIVLSEIQKKPQRGMPKVEKVEKNGTIISIILGVGSSRMLYDIVPVVSFKGWPAVAQSWLMENHFWDGKITEEEVISGFYLVPACSYKGKKDNEWRLSFARSEVQLKKCISSSLMQAYQACKAIIIKLLSRPKAISPYHLRSMMLWACDRLPANYLAQEDYAAHFLLGLIDDLQHCLVNKMCPNYFIPQCNMLEHLSEETVMLHARKLSSVRSDPAEHLRTAIEHVKAANRLTLELQRRGSTTSIPSPQSDGGDPNQPDDRLAKKLQQLVTENPGKSISVFINPDDVTRPHFRIDDKFF

SEQ ID NO: 130 - DNA, 6112 bp, Homo sapiens
  ref <308>: DATABASE ACCESSION NUMBER: NCBI / NM_004938.3
  ref <309>: DATABASE ENTRY DATE: 2014-05-05
  ref <313>: RELEVANT RESIDUES IN SEQ ID NO: (1)..(6112)
agagcgcgccagcgagcccggagcgcggagctgggaggagcagcgagcgccgcgcagaacccgcagcgccggcctggcagggcagctcggaggtgggtgggccgcgccgccagcccgcttgcagggtccccattggccgcctgccggccgccctccgcccaaaaggcggcaaggagccgagaggctgcttcggagtgtgaggaggacagccggaccgagccaacgccggggactttgttccctccgcggaggggactcggcaactcgcagcggcagggtctggggccggcgcctgggagggatctgcgccccccactcactccctagctgtgttcccgccgccgccccggctagtctccggcgctggcgcctatggtcggcctccgacagcgctccggagggaccgggggagctcccaggcgcccgggactggagactgatgcatgagggggctacggaggcgcaggagcggtggtgatggtctgggaagcggagctgaagtgccctgggctttggtgaggcgtgacagtttatcatgaccgtgttcaggcaggaaaacgtggatgattactacgacaccggcgaggaacttggcagtggacagtttgcggttgtgaagaaatgccgtgagaaaagcaccggcctccagtatgccgccaaattcatcaagaaaaggaggactaagtccagccggcggggtgtgagccgcgaggacatcgagcgggaggtcagcatcctgaaggagatccagcaccccaatgtcatcaccctgcacgaggtctatgagaacaagacggacgtcatcctgatcttggaactcgttgcaggtggcgagctgtttgacttcttagctgaaaaggaatctttaactgaagaggaagcaactgaatttctcaaacaaattcttaatggtgtttactacctgcactcccttcaaatcgcccactttgatcttaagcctgagaacataatgcttttggatagaaatgtccccaaacctcggatcaagatcattgactttgggttggcccataaaattgactttggaaatgaatttaaaaacatatttgggactccagagtttgtcgctcctgagatagtcaactatgaacctcttggtcttgaggcagatatgtggagtatcggggtaataacctatatcctcctaagtggggcctccccatttcttggagacactaagcaagaaacgttagcaaatgtatccgctgtcaactacgaatttgaggatgaatacttcagtaataccagtgccctagccaaagatttcataagaagacttctggtcaaggatccaaagaagagaatgacaattcaagatagtttgcagcatccctggatcaagcctaaagatacacaacaggcacttagtagaaaagcatcagcagtaaacatggagaaattcaagaagtttgcagcccggaaaaaatggaaacaatccgttcgcttgatatcactgtgccaaagattatccaggtcattcctgtccagaagtaacatgagtgttgccagaagcgatgatactctggatgaggaagactcctttgtgatgaaagccatcatccatgccatcaacgatgacaatgtcccaggcctgcagcaccttctgggctcattatccaactatgatgttaaccaacccaacaagcacgggacacctccattactcattgctgctggctgtgggaatattcaaatactacagttgctcattaaaagaggctcgagaatcgatgtccaggataagggcgggtccaatgccgtctactgggctgctcggcatggccacgtcgataccttgaaatttctcagtgagaacaaatgccctttggatgtgaaagacaagtctggagagatggccctccacgtggcagctcgctatggccatgctgacgtggctcagttactgtgcagcttcggctcaaatcccaatatccaggacaaggaagaagaaacccccctgcactgtgctgcttggcacggctattactctgtggccaaagccctttgtgaagccggctgtaacgtgaacatcaagaaccgagaaggagagacgcccctcctgacagcctctgccaggggctaccacgacatcgtggagtgtctggccgaacatggagccgaccttaatgcttgcgacaaggacggacacattgcccttcatctggctgtaagacggtgtcagatggaggtaatcaagactctcctcagccaagggtgtttcgtcgattatcaagacaggcacggcaatactcccctccatgtggcatgtaaagatggcaacatgcctatcgtggtggccctctgtgaagcaaactgcaatttggacatctccaacaagtatgggcgaacgcctctgcaccttgcggccaacaacggaatcctagacgtggtccggtatctctgtctgatgggagccagcgttgaggcgctgaccacggacggaaagacggcagaagatcttgctagatcggaacagcacgagcacgtagcaggtctccttgcaagacttcgaaaggatacgcaccgaggactcttcatccagcagctccgacccacacagaacctgcagccaagaattaagctcaagctgtttggccactcgggatccgggaaaaccacccttgtagaatctctcaagtgtgggctgctgaggagctttttcagaaggcgtcggcccagactgtcttccaccaactccagcaggttcccaccttcacccctggcttctaagcccacagtctcagtgagcatcaacaacctgtacccaggctgcgagaacgtgagtgtgaggagccgcagcatgatgttcgagccgggtcttaccaaagggatgctggaggtgtttgtggccccgacccaccacccgcactgctcggccgatgaccagtccaccaaggccatcgacatccagaacgcttatttgaatggagttggcgatttcagcgtgtgggagttctctggaaatcctgtgtatttctgctgttatgactattttgctgcaaatgatcccacgtcaatccatgttgttgtctttagtctagaagagccctatgagatccagctgaaccaagtgattttctggctcagtttcctgaagtcccttgtcccagttgaagaacccatagccttcggtggcaagctgaagaacccactccaagttgtcctggtggccacccacgctgacatcatgaatgttcctcgaccggctggaggcgagtttggatatgacaaagacacatcgttgctgaaagagattaggaacaggtttggaaatgatcttcacatttcaaataagctgtttgttctggatgctggggcttctgggtcaaaggacatgaaggtacttcgaaatcatctgcaagaaatacgaagccagattgtttcggtctgtcctcccatgactcacctgtgtgagaaaatcatctccacgctgccttcctggaggaagctcaatggacccaaccagctgatgtcgctgcagcagtttgtgtacgacgtgcaggaccagctgaaccccctggccagcgaggaggacctcaggcgcattgctcagcagctccacagcacaggcgagatcaacatcatgcaaagtgaaacagttcaggacgtgctgctcctggacccccgctggctctgcacaaacgtcctggggaagttgctgtccgtggagaccccacgggcgctgcaccactaccggggccgctacaccgtggaggacatccagcgcctggtgcccgacagcgacgtggaggagctgctgcagatcctcgatgccatggacatctgcgcccgggacctgagcagcgggaccatggtggacgtcccagccctgatcaagacagacaacctgcaccgctcctgggctgatgaggaggacgaggtgatggtgtatggtggcgtgcgcatcgtgcccgtggaacacctcacccccttcccatgtggcatctttcacaaggtccaggtgaacctgtgccggtggatccaccagcaaagcacagagggcgacgcggacatccgcctgtgggtgaatggctgcaagctggccaaccgtggggccgagctgctggtgctgctggtcaaccacggccagggcattgaggtccaggtccgcggcctggagacggagaagatcaagtgctgcctgctgctggactcggtgtgcagcaccattgagaacgtcatggccaccacgctgccagggctcctgaccgtgaagcattacctgagcccccagcagctgcgggagcaccatgagcccgtcatgatctaccagccacgggacttcttccgggcacagactctgaaggaaacctcactgaccaacaccatgggggggtacaaggaaagcttcagcagcatcatgtgcttcgggtgtcacgacgtctactcacaggccagcctcggcatggacatccatgcatcagacctgaacctcctcactcggaggaaactgagtcgcctgctggacccgcccgaccccctggggaaggactggtgccttctcgccatgaacttaggcctccctgacctcgtggcaaagtacaacaccagtaacggggctcccaaggatttcctccccagccccctccacgccctgctgcgggaatggaccacctaccctgagagcacagtgggcaccctcatgtccaaactgagggagctgggtcgccgggatgccgcagactttttgctgaaggcatcctctgtgttcaaaatcaacctggatggcaatggccaggaggcctatgcctcgagctgcaacagcggcacctcttacaattccattagctctgttgtatcccggtgagggcagcctctggcttgggcagggtctgtttggactgcagaagcaagggggtgatgtagcccatccttccctttggagatgctgagggtgtttcttcctgcacccacagccagggggatgccactcctccctccggcttgacctgtttctctgccgctacctccctccccgtctcattccgttgtctgtggatggtcattgcagtttaagagcagaacagatcttttactttggccgcttgaaaagctagtgtacctcctctcagtgttttggactccatctctcatcctccagtaccttgcttcttactgataattttgctggaattcctaacttttcaatgacattttttttaactactatattgattgtcctttaaaaaagaaaagtgcatatttatccaaaatgtgtatttcttatacgcttttctttgttataccatttcctcagcttatctcttttatatttgtaggagaaactcccatgtatggaatcccactgtatgatttataaacagacaatatgtgagtgccttttgcagaagagggtgtgtttgaaatcatcggagtcagccaggagctgtcaccaaggaaacgctacctctctgtcccttgctgtatgctgatcatcgccagaggtgcttcaccctgagttttgttttgtattgttttctgacagtttttctgttttgtttggcaaggaaaggggagaagggaatcctcctccagggtgattttatgatcagtgttgttgctctaggaagacatttttccgtttgcttttgttccaatgtcaatgtgaacgtccacatgaaacctacacactgtcatgcttcatcattccctctcatctcaggtagaaggttgacacagttgtagggttacagagacctatgtaagaattcagaagacccctgactcatcatttgtggcagtcccttataattggtgcatagcagatggtttccacatttagatcctggtttcataacttcctgtacttgaagtctaaaagcagaaaataaaggaagcaagttttcttccatgattttaaattgtgatcgagttttaaattgataggagggaacatgtcctaattcttctgtcctgagaagcatgtaatgttaatgttatatcatatgtatatatatatatgcactatgtatatacatatatattaatactggtatttttacttaatctataaaatgtcgttaaaaagttgtttgtttttttctttttttataaataaactgttgctcgttgcattaaaaaaaaaaaaaaa

SEQ ID NO: 131 - protein, 1430 aa, Homo sapiens
  ref <308>: DATABASE ACCESSION NUMBER: NCBI / NP_004929.2
  ref <309>: DATABASE ENTRY DATE: 2014-05-05
  ref <313>: RELEVANT RESIDUES IN SEQ ID NO: (1)..(1430)
MTVFRQENVDDYYDTGEELGSGQFAVVKKCREKSTGLQYAAKFIKKRRTKSSRRGVSREDIEREVSILKEIQHPNVITLHEVYENKTDVILILELVAGGELFDFLAEKESLTEEEATEFLKQILNGVYYLHSLQIAHFDLKPENIMLLDRNVPKPRIKIIDFGLAHKIDFGNEFKNIFGTPEFVAPEIVNYEPLGLEADMWSIGVITYILLSGASPFLGDTKQETLANVSAVNYEFEDEYFSNTSALAKDFIRRLLVKDPKKRMTIQDSLQHPWIKPKDTQQALSRKASAVNMEKFKKFAARKKWKQSVRLISLCQRLSRSFLSRSNMSVARSDDTLDEEDSFVMKAIIHAINDDNVPGLQHLLGSLSNYDVNQPNKHGTPPLLIAAGCGNIQILQLLIKRGSRIDVQDKGGSNAVYWAARHGHVDTLKFLSENKCPLDVKDKSGEMALHVAARYGHADVAQLLCSFGSNPNIQDKEEETPLHCAAWHGYYSVAKALCEAGCNVNIKNREGETPLLTASARGYHDIVECLAEHGADLNACDKDGHIALHLAVRRCQMEVIKTLLSQGCFVDYQDRHGNTPLHVACKDGNMPIVVALCEANCNLDISNKYGRTPLHLAANNGILDVVRYLCLMGASVEALTTDGKTAEDLARSEQHEHVAGLLARLRKDTHRGLFIQQLRPTQNLQPRIKLKLFGHSGSGKTTLVESLKCGLLRSFFRRRRPRLSSTNSSRFPPSPLASKPTVSVSINNLYPGCENVSVRSRSMMFEPGLTKGMLEVFVAPTHHPHCSADDQSTKAIDIQNAYLNGVGDFSVWEFSGNPVYFCCYDYFAANDPTSIHVVVFSLEEPYEIQLNQVIFWLSFLKSLVPVEEPIAFGGKLKNPLQVVLVATHADIMNVPRPAGGEFGYDKDTSLLKEIRNRFGNDLHISNKLFVLDAGASGSKDMKVLRNHLQEIRSQIVSVCPPMTHLCEKIISTLPSWRKLNGPNQLMSLQQFVYDVQDQLNPLASEEDLRRIAQQLHSTGEINIMQSETVQDVLLLDPRWLCTNVLGKLLSVETPRALHHYRGRYTVEDIQRLVPDSDVEELLQILDAMDICARDLSSGTMVDVPALIKTDNLHRSWADEEDEVMVYGGVRIVPVEHLTPFPCGIFHKVQVNLCRWIHQQSTEGDADIRLWVNGCKLANRGAELLVLLVNHGQGIEVQVRGLETEKIKCCLLLDSVCSTIENVMATTLPGLLTVKHYLSPQQLREHHEPVMIYQPRDFFRAQTLKETSLTNTMGGYKESFSSIMCFGCHDVYSQASLGMDIHASDLNLLTRRKLSRLLDPPDPLGKDWCLLAMNLGLPDLVAKYNTSNGAPKDFLPSPLHALLREWTTYPESTVGTLMSKLRELGRRDAADFLLKASSVFKINLDGNGQEAYASSCNSGTSYNSISSVVSR

SEQ ID NO: 132 - DNA, 5802 bp, Homo sapiens
  ref <308>: DATABASE ACCESSION NUMBER: NCBI / NM_005458.7
  ref <309>: DATABASE ENTRY DATE: 2014-05-25
  ref <313>: RELEVANT RESIDUES IN SEQ ID NO: (1)..(5802)
gccgcccctgagcagcctcgccttcgcctcccgcgtttcctgccgtccgccctcccccggccgagctccaggggctgccgcctagcagctcccggcgggagagcggttcagagcgcgcacgggggcgggcggaggcggcccggtgcggggcggccgcgctggagagaggcgcgcgcggagacgccggcccccctctccgcgtttgctcgcttgctccccgcctcccgcactccgctcgctcccaccccttcccggcgtgattgatccgtcacgggcgccgccgctgccgccgccgccgccgcggccgttctgagccgagccggaaccctagcccgagacggagccggggcccgggccggcgccattgcgcgggcgccgcgggaagaccttggcgcggggcggcgggccgggccaggccatgcgggccgagtgagccggcgcccgcagcccgcggcgcggcatggcttccccgcggagctccgggcagcccgggccgccgccgccgccgccaccgccgcccgcgcgcctgctactgctactgctgctgccgctgctgctgcctctggcgcccggggcctggggctgggcgcggggcgccccccggccgccgcccagcagcccgccgctctccatcatgggcctcatgccgctcaccaaggaggtggccaagggcagcatcgggcgcggtgtgctccccgccgtggaactggccatcgagcagatccgcaacgagtcactcctgcgcccctacttcctcgacctgcggctctatgacacggagtgcgacaacgcaaaagggttgaaagccttctacgatgcaataaaatacgggcctaaccacttgatggtgtttggaggcgtctgtccatccgtcacatccatcattgcagagtccctccaaggctggaatctggtgcagctttcttttgctgcaaccacgcctgttctagccgataagaaaaaatacccttatttctttcggaccgtcccatcagacaatgcggtgaatccagccattctgaagttgctcaagcactaccagtggaagcgcgtgggcacgctgacgcaagacgttcagaggttctctgaggtgcggaatgacctgactggagttctgtatggcgaggacattgagatttcagacaccgagagcttctccaacgatccctgtaccagtgtcaaaaagctgaaggggaatgatgtgcggatcatccttggccagtttgaccagaatatggcagcaaaagtgttctgttgtgcatacgaggagaacatgtatggtagtaaatatcagtggatcattccgggctggtacgagccttcttggtgggagcaggtgcacacggaagccaactcatcccgctgcctccggaagaatctgcttgctgccatggagggctacattggcgtggatttcgagcccctgagctccaagcagatcaagaccatctcaggaaagactccacagcagtatgagagagagtacaacaacaagcggtcaggcgtggggcccagcaagttccacgggtacgcctacgatggcatctgggtcatcgccaagacactgcagagggccatggagacactgcatgccagcagccggcaccagcggatccaggacttcaactacacggaccacacgctgggcaggatcatcctcaatgccatgaacgagaccaacttcttcggggtcacgggtcaagttgtattccggaatggggagagaatggggaccattaaatttactcaatttcaagacagcagggaggtgaaggtgggagagtacaacgctgtggccgacacactggagatcatcaatgacaccatcaggttccaaggatccgaaccaccaaaagacaagaccatcatcctggagcagctgcggaagatctccctacctctctacagcatcctctctgccctcaccatcctcgggatgatcatggccagtgcttttctcttcttcaacatcaagaaccggaatcagaagctcataaagatgtcgagtccatacatgaacaaccttatcatccttggagggatgctctcctatgcttccatatttctctttggccttgatggatcctttgtctctgaaaagacctttgaaacactttgcaccgtcaggacctggattctcaccgtgggctacacgaccgcttttggggccatgtttgcaaagacctggagagtccacgccatcttcaaaaatgtgaaaatgaagaagaagatcatcaaggaccagaaactgcttgtgatcgtggggggcatgctgctgatcgacctgtgtatcctgatctgctggcaggctgtggaccccctgcgaaggacagtggagaagtacagcatggagccggacccagcaggacgggatatctccatccgccctctcctggagcactgtgagaacacccatatgaccatctggcttggcatcgtctatgcctacaagggacttctcatgttgttcggttgtttcttagcttgggagacccgcaacgtcagcatccccgcactcaacgacagcaagtacatcgggatgagtgtctacaacgtggggatcatgtgcatcatcggggccgctgtctccttcctgacccgggaccagcccaatgtgcagttctgcatcgtggctctggtcatcatcttctgcagcaccatcaccctctgcctggtattcgtgccgaagctcatcaccctgagaacaaacccagatgcagcaacgcagaacaggcgattccagttcactcagaatcagaagaaagaagattctaaaacgtccacctcggtcaccagtgtgaaccaagccagcacatcccgcctggagggcctacagtcagaaaaccatcgcctgcgaatgaagatcacagagctggataaagacttggaagaggtcaccatgcagctgcaggacacaccagaaaagaccacctacattaaacagaaccactaccaagagctcaatgacatcctcaacctgggaaacttcactgagagcacagatggaggaaaggccattttaaaaaatcacctcgatcaaaatccccagctacagtggaacacaacagagccctctcgaacatgcaaagatcctatagaagatataaactctccagaacacatccagcgtcggctgtccctccagctccccatcctccaccacgcctacctcccatccatcggaggcgtggacgccagctgtgtcagcccctgcgtcagccccaccgccagcccccgccacagacatgtgccaccctccttccgagtcatggtctcgggcctgtaagggtgggaggcctgggcccggggcctcccccgtgacagaaccacactgggcagaggggtctgctgcagaaacactgtcggctctggctgcggagaagctgggcaccatggctggcctctcaggaccactcggatggcactcaggtggacaggacggggcagggggagacttggcacctgacctcgagccttatttgtgaagtccttatttcttcacaaagaagaggaacggaaatgggacgtcttccttaacatctgcaaacaaggaggcgctgggatatcaaacttgcaaaaaaaaaaaaaaaaaaaaaaaaacaaaaaaactagacaaggagagaggcactagaactccagctggaagtcacggagtggctcgagcagccttgggaagaggcaaggagcttctgaagaaactgcctctgcacacacatcactggctgtgacccctcaggctagcccttctccactctgggggaggaggtgggaagggccaccaggcccccagctgccaggccagctgaccccagccttcctggaacagggagtctgcaggagcgcagacaggcacagccctggagcaggcaggccgagggctgcggcactggagcaggctgacttacatgctccacatgggacctgtgtcacccaatgagatgtttgttactctggtaaatgccacacgttaacacaataacacccattcctgggaccgtggggatttagggcacgtcactgcagacacgctctgcagcattcaccgacagtctgtcatgcacccaccacgttggccatgtccttgtgttcctatcggatgctcccagtaaccagggggaccacccgagctaatcatggaatgtctgttcccagcaaacacgataaagaaagattgtgcactttaacctctctcatcagggcccaagggctggctgggattttttttttttttttcccactaactttgtttctgaccaaagtgaattggaggcactctgctaaaagacatccccgtagacataggggagagagttgctggctgagggcttcccttggcttccagaaggcagccttccatccagacaagccagtgagctctccccttgggatcactggggtgatcagtcagcagattgattctcattcataagatcattcctccctttaaattgagcccctaagagcactggcctgggagtcagacagacctgggttcaagtcctcagtcccctgcccactccctacgtgactttgatcaggtcactagtgtctctctgagcctcagtttcccctctgtaacttggggttgaactaaaacacctgtcctgcctacctcacaaggtcactctgaggattgaaacttgatcttgtccaggaaagctttgtaccaaacagtgaagccgccctgatccgtgaggtatgagtatgactctgaccttcagccctccctacagccgggggtgtggcccagagaagcttccagcacagccctctacccagaacatccgggctggagggaggctcccagtgacttttctgacattcctagacaggttcattctttgctcaagaaaggcctgaatgacaatgtccaggatgtctgcacaactgagcagctcgctcactccctaaagaaacctattggcagcttcaacaggcaggcaataatctcttcccagaaccactgcagtcaggaataaactgttttctccaccaggctttgacaaaagggcccacaggaatcttaccaatgccaacatttcaaagcaccctatttcacgtagcatagctttctgctccccttccccaaagagaggttatggaggtactgtagcttttagggaaaaaaaaatgttaacacatcacaggtcaagttgaagtcattctctgtttaggcactaaaaatcggtgttgtcactcactgtgtattaccagtatttacttgctttcttgatttcaccaaaaccaaatttaatttaaaggaccacattaatttttcaaagggaaagagacaattaattgtacataatgtatacacacacacaaaaaaaaatacctgtagaaatattattccagcatagcaggaaaacaaacaaaagtattggactgtcggaggtgagcctgtgcgtctgtaaccctttgtgactcctgagcgtgcgctgtcttctaggttaactcacgaagtacattctctgtcttactgatactgtaggttcacccatttttttttaatttcctcgcaaataacaagacccacagaagtgactctagctacttaatggttctgttcttttatatgcagcaaacacaccgtccatttctgaagaggcttcggcctgaaggcattttccaatgatgttagtgcacaaaacgctttaaattagactggaactgccagaatcaaatgtaaatgaggaatttctcgtacccctactgcatggtatcgatttttaataaattgttgcaaatttgtttttatgaataaaaggaaaaaacctgtcgtctttaaaaaaaaaaaaaaaa

SEQ ID NO: 133 - protein, 941 aa, Homo sapiens
  ref <308>: DATABASE ACCESSION NUMBER: NCBI / NP_005449.5
  ref <309>: DATABASE ENTRY DATE: 2014-05-25
  ref <313>: RELEVANT RESIDUES IN SEQ ID NO: (1)..(941)
MASPRSSGQPGPPPPPPPPPARLLLLLLLPLLLPLAPGAWGWARGAPRPPPSSPPLSIMGLMPLTKEVAKGSIGRGVLPAVELAIEQIRNESLLRPYFLDLRLYDTECDNAKGLKAFYDAIKYGPNHLMVFGGVCPSVTSIIAESLQGWNLVQLSFAATTPVLADKKKYPYFFRTVPSDNAVNPAILKLLKHYQWKRVGTLTQDVQRFSEVRNDLTGVLYGEDIEISDTESFSNDPCTSVKKLKGNDVRIILGQFDQNMAAKVFCCAYEENMYGSKYQWIIPGWYEPSWWEQVHTEANSSRCLRKNLLAAMEGYIGVDFEPLSSKQIKTISGKTPQQYEREYNNKRSGVGPSKFHGYAYDGIWVIAKTLQRAMETLHASSRHQRIQDFNYTDHTLGRIILNAMNETNFFGVTGQVVFRNGERMGTIKFTQFQDSREVKVGEYNAVADTLEIINDTIRFQGSEPPKDKTIILEQLRKISLPLYSILSALTILGMIMASAFLFFNIKNRNQKLIKMSSPYMNNLIILGGMLSYASIFLFGLDGSFVSEKTFETLCTVRTWILTVGYTTAFGAMFAKTWRVHAIFKNVKMKKKIIKDQKLLVIVGGMLLIDLCILICWQAVDPLRRTVEKYSMEPDPAGRDISIRPLLEHCENTHMTIWLGIVYAYKGLLMLFGCFLAWETRNVSIPALNDSKYIGMSVYNVGIMCIIGAAVSFLTRDQPNVQFCIVALVIIFCSTITLCLVFVPKLITLRTNPDAATQNRRFQFTQNQKKEDSKTSTSVTSVNQASTSRLEGLQSENHRLRMKITELDKDLEEVTMQLQDTPEKTTYIKQNHYQELNDILNLGNFTESTDGGKAILKNHLDQNPQLQWNTTEPSRTCKDPIEDINSPEHIQRRLSLQLPILHHAYLPSIGGVDASCVSPCVSPTASPRHRHVPPSFRVMVSGL

SEQ ID NO: 134 - DNA, 3318 bp, Homo sapiens
  ref <308>: DATABASE ACCESSION NUMBER: NCBI / NM_002069.5
  ref <309>: DATABASE ENTRY DATE: 2014-04-06
  ref <313>: RELEVANT RESIDUES IN SEQ ID NO: (1)..(3318)
ggaggccgagctcggctgggcttggcgaggctgcggcgcggccaccggcgggagtgcagcggccactgtacccagagattcaaaaccccaaacccgggacttgggggcgctgagccgggccgggaagcagagcctggtcgtgaggaacagccgcccgttgctgtctgcccctttgcggacagcgtctccctcgactccgcttaggaagtggtgggggcggcgtggcccccgtcgggaggcgttcgaacgcccgctaggagagagaaaggattcccctgtgcttggagcccgcactcgggcgcggagggagcggcggcaggctctcgctttcggcaccatgggctgcacgctgagcgccgaggacaaggcggcggtggagcggagtaagatgatcgaccgcaacctccgtgaggacggcgagaaggcggcgcgcgaggtcaagctgctgctgctcggtgctggtgaatctggtaaaagtacaattgtgaagcagatgaaaattatccatgaagctggttattcagaagaggagtgtaaacaatacaaagcagtggtctacagtaacaccatccagtcaattattgctatcattagggctatggggaggttgaagatagactttggtgactcagcccgggcggatgatgcacgccaactctttgtgctagctggagctgctgaagaaggctttatgactgcagaacttgctggagttataaagagattgtggaaagatagtggtgtacaagcctgtttcaacagatcccgagagtaccagcttaatgattctgcagcatactatttgaatgacttggacagaatagctcaaccaaattacatcccgactcaacaagatgttctcagaactagagtgaaaactacaggaattgttgaaacccattttactttcaaagatcttcattttaaaatgtttgatgtgggaggtcagagatctgagcggaagaagtggattcattgcttcgaaggagtgacggcgatcatcttctgtgtagcactgagtgactacgacctggttctagctgaagatgaagaaatgaaccgaatgcatgaaagcatgaaattgtttgacagcatatgtaacaacaagtggtttacagatacatccattatactttttctaaacaagaaggatctctttgaagaaaaaatcaaaaagagccctctcactatatgctatccagaatatgcaggatcaaacacatatgaagaggcagctgcatatattcaatgtcagtttgaagacctcaataaaagaaaggacacaaaggaaatatacacccacttcacatgtgccacagatactaagaatgtgcagtttgtttttgatgctgtaacagatgtcatcataaaaaataatctaaaagattgtggtctcttttaagttttgcagttcatggtaaaatgcattttcaaaccaaatgagtacttatatatggatctctgtagactagagtcttgcagcaacacagaatgtaatataaggcaaatgcatctgggacttgaccaaagttgttctgttttgtttttttaactgaaagtaacagaaggacctttcttaaatgtgacagatggtcctgcagtgtgaaactgaaggacagtgttaaagctgggctctagtatattgatgatttctgcataagtgtaaatatgcaaatgtatgtatacatgtatttatgactttagttttcgacattatttttaggttttaagagtggcaacttaggattttagggtgatggctttggaaataacataaatataccttgtactgaatgacagactattactacgtttgccagttttaaacagctttatttatgttcatgtcctgtaaatttttaagtacagtaattaatattaggaaacattacagcccttatctagattatatgtatacttgtattaataaaaatgttatttgtacaaacattgcacagactattttaataacatgatttgttctttaaattttatgtgttttattgaaatgttcttaagatgaatacacctgcctttggatcaactatttaaacattgtatgcattttgatttttcctactttaagaaaataaaataatttaattttacattagattccacgttagatttggtttgaaaaactaaaatttcagatttctgaggatatactgtcttagacttattgtacacacttagtttttattcacttgttttcactctgaattttaatatttggctgatatgaatgcattgcctcaaaggtgatgtcatcttaatttttattcactttaaataactacatttttgtttataactaagtttggagggatcctaagagcatttttgtgggtaaaaaaaaaacctgtggacataatgaattttgagacattgattggtgaggcttttatttcccttgaggagtctcttgtacctagcatacatgatagctccttgttgggaagataacaagaaggatctttgaatactctattgctgatataatgcaagatttaaatttatacatataactaatttcaaatgtaattatcacactatgttaaaattacttttttcccttagataattcaaatttctccacttgcttgagattatatcatttctttttcaattatactattatttctgagaatgaaatggacgattacacttagaaaatgagtaatagtgtttaataagtcagtgattatatgtgtgctcaaataagtgttatgtatcagctagatactgagctttgatagaataattttcttttgattattcatgatgtgtcatctctgaccttgtttcagcaaagtaaacagcactccccaccccaccctcctttttttactcatcttggaaaaggttagtctttcagtacacgttgctggtaagtagtttccaagttacgtgttgtcactgggttgaagtatatttgtgtgtgtgtgtgtgtgtgtgtgtgtgtgtgtaaccataaactatattcatatctgtttcatttggaggattttcttctttgtaatgtaaagaaattcaaagttatcaaagttccttaaatgtgttagtttagattctttatgtgcctttcatgaaagatatgttttcattaattttactggtggacctgtaatatccacattgtgaagctgtgtatgaaattcaactataatatgaataaatttgaatcatgagaattatgggttaaaaagccacaaagaagcacatattggtgaccatcattaatgaaatcctgaactttattctgtgtaattgtgttaataaatcctaataaatttaaatttttaaaattttacaaac

SEQ ID NO: 135 - protein, 354 aa, Homo sapiens
  ref <308>: DATABASE ACCESSION NUMBER: NCBI / NP_002060.4
  ref <309>: DATABASE ENTRY DATE: 2014-04-06
  ref <313>: RELEVANT RESIDUES IN SEQ ID NO: (1)..(354)
MGCTLSAEDKAAVERSKMIDRNLREDGEKAAREVKLLLLGAGESGKSTIVKQMKIIHEAGYSEEECKQYKAVVYSNTIQSIIAIIRAMGRLKIDFGDSARADDARQLFVLAGAAEEGFMTAELAGVIKRLWKDSGVQACFNRSREYQLNDSAAYYLNDLDRIAQPNYIPTQQDVLRTRVKTTGIVETHFTFKDLHFKMFDVGGQRSERKKWIHCFEGVTAIIFCVALSDYDLVLAEDEEMNRMHESMKLFDSICNNKWFTDTSIILFLNKKDLFEEKIKKSPLTICYPEYAGSNTYEEAAAYIQCQFEDLNKRKDTKEIYTHFTCATDTKNVQFVFDAVTDVIIKNNLKDCGLF

SEQ ID NO: 136 - DNA, 4197 bp, Homo sapiens
  ref <308>: DATABASE ACCESSION NUMBER: NCBI / NM_000623.3
  ref <309>: DATABASE ENTRY DATE: 2014-04-27
  ref <313>: RELEVANT RESIDUES IN SEQ ID NO: (1)..(4197)
atcactacccagcccttgaaagatgagctgttcccgccgccactccagctctggcttctgggctccgaggaggggtggggacggtggggacggtggggacatcaggctgccccgcagtaccagggagcgactgaagtgcccatgccgcttgctccggagaaggtgtggcctcactcacatcccactctgagtccaaatgttctctccctggaagatatcaatgtttctgtctgttcgtgaggactccgtgcccaccacggcctctttcagcgccgacatgctcaatgtcaccttgcaagggcccactcttaacgggacctttgcccagagcaaatgcccccaagtggagtggctgggctggctcaacaccatccagccccccttcctctgggtgctgttcgtgctggccaccctagagaacatctttgtcctcagcgtcttctgcctgcacaagagcagctgcacggtggcagagatctacctggggaacctggccgcagcagacctgatcctggcctgcgggctgcccttctgggccatcaccatctccaacaacttcgactggctctttggggagacgctctgccgcgtggtgaatgccattatctccatgaacctgtacagcagcatctgtttcctgatgctggtgagcatcgaccgctacctggccctggtgaaaaccatgtccatgggccggatgcgcggcgtgcgctgggccaagctctacagcttggtgatctgggggtgtacgctgctcctgagctcacccatgctggtgttccggaccatgaaggagtacagcgatgagggccacaacgtcaccgcttgtgtcatcagctacccatccctcatctgggaagtgttcaccaacatgctcctgaatgtcgtgggcttcctgctgcccctgagtgtcatcaccttctgcacgatgcagatcatgcaggtgctgcggaacaacgagatgcagaagttcaaggagatccagacagagaggagggccacggtgctagtcctggttgtgctgctgctattcatcatctgctggctgcccttccagatcagcaccttcctggatacgctgcatcgcctcggcatcctctccagctgccaggacgagcgcatcatcgatgtaatcacacagatcgcctccttcatggcctacagcaacagctgcctcaacccactggtgtacgtgatcgtgggcaagcgcttccgaaagaagtcttgggaggtgtaccagggagtgtgccagaaagggggctgcaggtcagaacccattcagatggagaactccatgggcacactgcggacctccatctccgtggaacgccagattcacaaactgcaggactgggcagggagcagacagtgagcaaacgccagcagggctgctgtgaatttgtgtaaggattgagggacagttgcttttcagcatgggcccaggaatgccaaggagacatctatgcacgaccttgggaaatgagttgatgtctccggtaaaacaccggagactaattcctgccctgcccaattttgcagggagcatggctgtgaggatggggtgaactcacgcacagccaaggactccaaaatcacaacagcattactgttcttatttgctgccacacctgagccagcctgctccttcccaggagtggaggaggcctgggggcagggagaggagtgactgagcttccctcccgtgtgttctccgtccctgccccagcaagacaacttagatctccaggagaactgccatccagctttggtgcaatggctgagtgcacaagtgagttgttgccctgggtttctttaatctattcagctagaactttgaaggacaatttcttgcattaataaaggttaagccctgaggggtccctgataacaacctggagaccaggattttatggctcccctcactgatggacaaggaggtctgtgccaaagaagaatccaataagcacatattgagcacttgctgtatatgcagtattgagcactgtaggcaagagggaagaaagagaaggagccatctccatcttgaaggaactcaaagactcaagtgggaacgactgggcactgccaccaccagaaagctgttcgacgagacggtcgagcagggtgctgtgggtgatatggacagcagaagggggagaccaaggttccagctcaaccaataactattgcacaaccatctgtccctgcctcagttccctcttctgtaacatgaagtcgttgtgagggttaaaggcagtaacaggtataaagtacttagaaaagcaaagggtgctacgtacatgtgaggcatcattacgcagacgtaactgggatatgtttactataaggaaaagacactgaggtctagaaatagctccgtggagcagaatcagtattgggagccggtggcggtgtgaagcaccagtgtctggcacacagtaggtgctcattggctcccttccacctgtcattcccaccaccctgaggccccaaccgccacacacacaggagcatttggagagaaggccatgtcttcaaagtctgatttgtgatgaggcagaggaagatatttctaatcggtcttgcccagaggatcacagtgctgagaccccccaccaccagccggtacctgggaagggggagagtgcaggcctgctcagggactgttcctgtctcagcaaccaagggattgttcctgtcaatcaatggtttattggaaggtggcccagtatgagccctagaagagtgtgaaaaggaatggcaatggtgttcaccatcggcagtgccagggcagcactcattcacttgataaatgaatatttattagctggttggagagctagaacctggagagctagaacctggagaactagaacctggagggctagaactggagaggctagaaccaagaagggctagaacctggaggggctagaacctagagaagctaaaacctgagctagaagctggaggactagaacctggagggctggaatctggagagctagaacctggagggctagaacctggagggctagaatctggagagctagaacctggagggctagaatctggagagctagaacctggagggctagaacctggagagctagaacctagaagggctagaacctggagggctggaatctggagagctagaacctggagggctagaacctggagggctagaacctagaagggctagaacctggagggctggaatctggagagctagaacctggagggctagaacctggagggctagaacctagaagggctagaacctggagggctagaacctggcaggttagaacctagaagggctagaacctggagagccagaacctggagggctagaacctggaagggctagaacctgtagagctagaacatggagagctagaacccggcaggctagaacctggcaagctagaacctggagggaatgaacctggagggctagaacctggagaatgagaaaaatttacatggcaaagagcccataaatcctgaccaatccaactctgaattttaaagcaaaagcgtcaaaaaaaagattccctccttacccccaacccactcttttttcccaccacccactctcctctgcctcagtaagtatctggaggaagaaaacaggtgaaagaagaagtaaaaaccatttagtattagtattagaatgaagtcaaactgtgccacacatggtgaatgaaaaaaaaaaaaagaggctgtgttttgtcacacagggcagtcattcagcaccagagcacgtgatggtctgagactctcttaggagcagagctctgccgcaatggccatgtggggatccacacctggtctgaggggcaactgagtctgcgggagaagagcggccctatgcatggtgtagatgccctgataaagaacatctgtcctgtgaaagactcaatgagctgttatgttgtaaacaggaagcatttcacatccaaacgagaaaatcatgtaaacatgtgtcttttctgtagagcataataaatggatgaggtttttgcatagctctagcatttgttacaactcccgaaacccccgagtttggtccctggggtaccgccttgcacactcagaagcctttgggaaggggtgctattcatttctgctcaatctgttaacaggcttctggcatgtagatcagtggtctccaagcttttgtgattgtat

SEQ ID NO: 137 - protein, 391 aa, Homo sapiens
  ref <308>: DATABASE ACCESSION NUMBER: NCBI / NP_000614.1
  ref <309>: DATABASE ENTRY DATE: 2014-04-27
  ref <313>: RELEVANT RESIDUES IN SEQ ID NO: (1)..(391)
MFSPWKISMFLSVREDSVPTTASFSADMLNVTLQGPTLNGTFAQSKCPQVEWLGWLNTIQPPFLWVLFVLATLENIFVLSVFCLHKSSCTVAEIYLGNLAAADLILACGLPFWAITISNNFDWLFGETLCRVVNAIISMNLYSSICFLMLVSIDRYLALVKTMSMGRMRGVRWAKLYSLVIWGCTLLLSSPMLVFRTMKEYSDEGHNVTACVISYPSLIWEVFTNMLLNVVGFLLPLSVITFCTMQIMQVLRNNEMQKFKEIQTERRATVLVLVVLLLFIICWLPFQISTFLDTLHRLGILSSCQDERIIDVITQIASFMAYSNSCLNPLVYVIVGKRFRKKSWEVYQGVCQKGGCRSEPIQMENSMGTLRTSISVERQIHKLQDWAGSRQ

SEQ ID NO: 138 - DNA, 114 bp, Homo sapiens
gatcttcacagctgtgacatggttattccataatccatccccaagaggagcccacccaaagcaaaaaatcaaatctatccatccattataagatgatccatccatagactatat

SEQ ID NO: 139 - DNA, 23 bp, Homo sapiens
tccatccattataagatgatcca

SEQ ID NO: 140 - DNA, 23 bp, Homo sapiens
tccatccagcgtaagatgatcca

SEQ ID NO: 141 - DNA, 23 bp, Homo sapiens
tccatccattagcggatgatcca

SEQ ID NO: 142 - DNA, 23 bp, Homo sapiens
tccatccattataagcggatcca

SEQ ID NO: 143 - DNA, 23 bp, Homo sapiens
tccatccagcggtcgcagatcca

SEQ ID NO: 144 - DNA, 23 bp, Homo sapiens
tccatccaaaataagatgatcca

SEQ ID NO: 145 - DNA, 23 bp, Homo sapiens
tccatccattaaaagatgatcca

SEQ ID NO: 146 - DNA, 23 bp, Homo sapiens
tccatccaaaaaaaaaagatcca

SEQ ID NO: 147 - DNA, 23 bp, Homo sapiens
tccatccattttaagatgatcca

SEQ ID NO: 148 - DNA, 23 bp, Homo sapiens
tccatccattatttgatgatcca

SEQ ID NO: 149 - DNA, 22 bp, Homo sapiens
tccatccattttttttgatcca

SEQ ID NO: 150 - DNA, 25 bp, Homo sapiens
acagtgatgaagatgagttccaaat

SEQ ID NO: 151 - DNA, 25 bp, Homo sapiens
gataagaactctggcatcctgactc

SEQ ID NO: 152 - DNA, 27 bp, Homo sapiens
atgaaggaaacaaagtaaaaataagca

SEQ ID NO: 153 - DNA, 25 bp, Homo sapiens
gtcatcatggacaactttgagtacc

SEQ ID NO: 154 - DNA, 23 bp, Homo sapiens
agtctcgggtgaggtactcaaag

SEQ ID NO: 155 - DNA, 21 bp, Homo sapiens
gacaacaccgtccacttcaat

SEQ ID NO: 156 - DNA, 21 bp, Homo sapiens
aatcttgatgtccagggctgt

SEQ ID NO: 157 - DNA, 20 bp, Homo sapiens
ccgacaaacagcagatggac

SEQ ID NO: 158 - DNA, 22 bp, Homo sapiens
ctagcgtcttctgggacagatt

SEQ ID NO: 159 - DNA, 20 bp, Homo sapiens
agagcaaggccaagaagctg

SEQ ID NO: 160 - DNA, 20 bp, Homo sapiens
cagcttcttggccttgctct

SEQ ID NO: 161 - DNA, 20 bp, Homo sapiens
ggacacccctcatgttccag

SEQ ID NO: 162 - DNA, 20 bp, Homo sapiens
gaaagcggcctcaaggagag

SEQ ID NO: 163 - DNA, 21 bp, Homo sapiens
cgtcttctggaacatctcctg

SEQ ID NO: 164 - DNA, 21 bp, Homo sapiens
agtagccatctctgcccatct

SEQ ID NO: 165 - protein, 7 aa, Homo sapiens
MIMEYYR

SEQ ID NO: 166 - protein, 5 aa, Homo sapiens
MIMEY

SEQ ID NO: 167 - DNA, 19 bp, Homo sapiens
atctacgcagccccatggg

SEQ ID NO: 168 - DNA, 21 bp, Homo sapiens
atctacgcagccatccatggg

SEQ ID NO: 169 - DNA, 20 bp, Homo sapiens
atctacgcagccaccatggg

SEQ ID NO: 170 - DNA, 54 bp, Homo sapiens
gagcccaccccaaagcaaaaaatcaaatctatccatccattataagatgatcca

SEQ ID NO: 171 - DNA, 51 bp, Homo sapiens
atatgacacccagcaagggatatcttgtttatagacttaaaaacaccaaac

SEQ ID NO: 172 - DNA, 47 bp, Homo sapiens
agaccatcatggccaacatggtgaaaccccgtctctactaaaaatac

SEQ ID NO: 173 - DNA, 49 bp, Homo sapiens
gagaccagcctgaccaacatggagaaactccgtctctactaaaaataca

SEQ ID NO: 174 - DNA, 50 bp, Homo sapiens
  misc_feature (14)..(14): n is a, c, g, or t
  misc_feature (21)..(23): n is a, c, g, or t
  misc_feature (31)..(31): n is a, c, g, or t
  misc_feature (34)..(34): n is a, c, g, or t
  misc_feature (46)..(46): n is a, c, g, or t
gagaccaccctgancaacatnnngaaactcngtntctactaaaaanacaa

SEQ ID NO: 175 - DNA, 23 bp, Homo sapiens
tccatccagcggtcgatgatcca

SEQ ID NO: 176 - DNA, 23 bp, Homo sapiens
tccatccattagtcgatgatcca

SEQ ID NO: 177 - DNA, 23 bp, Homo sapiens
tccatccagcgtaagatgatcca

SEQ ID NO: 178 - DNA, 23 bp, Homo sapiens
tccatccattataagatgatcca

SEQ ID NO: 179 - RNA, 22 nt, Artificial Sequence
  hsa-miR-3191-5p
cucucuggccgucuaccuucca

SEQ ID NO: 180 - DNA, 19 bp, Artificial Sequence
  CACNA1A IRES target of miR3191-5p
gggaagaagtgtccggcca

SEQ ID NO: 181 - DNA, 76 bp, Artificial Sequence
  AAD-miR3191-5p
ggggtcacctctctggccgtctaccttccacactgacaagggccgtggggacgtagctggccagacaggtgacccc

SEQ ID NO: 182 - DNA, 56 bp, Artificial Sequence
  Synthetic primer
atgtctccgcccctgggtctccccaacaactctggccccagagtggcttacaagcg

SEQ ID NO: 183 - DNA, 56 bp, Artificial Sequence
  Synthetic primer
cgcttgtaagccactctggggccagagttgttggggagacccaggggcggagacat

SEQ ID NO: 184 - DNA, 48 bp, Artificial Sequence
  Synthetic primer
actgagcacaataacttggccaggttgttggaggccctcatgcttctc

SEQ ID NO: 185 - DNA, 48 bp, Artificial Sequence
  Synthetic primer
gagaagcatgagggcctccaacaacctggccaagttattgtgctcagt

SEQ ID NO: 186 - DNA, 29 bp, Artificial Sequence
  Synthetic primer
atcaggatccgccctcaacaccatcgtgc

SEQ ID NO: 187 - DNA, 22 bp, Artificial Sequence
  Synthetic primer
gaatctagattacttgtcatcg

SEQ ID NO: 188 - DNA, 28 bp, Artificial Sequence
  Synthetic primer
atcaggatccatgtctgcgagccaggat

SEQ ID NO: 189 - DNA, 28 bp, Artificial Sequence
  Synthetic primer
atcagggcccaggtcagcaacattgagg

SEQ ID NO: 190 - DNA, 28 bp, Artificial Sequence
  Synthetic primer
atcaggatccatgtctggtggctccgcg

SEQ ID NO: 191 - DNA, 28 bp, Artificial Sequence
  Synthetic primer
atcagggcccttaaataaggtcagccac

SEQ ID NO: 192 - DNA, 20 bp, Artificial Sequence
  Synthetic primer
gtctggggaagaagtgtccg

SEQ ID NO: 193 - DNA, 20 bp, Artificial Sequence
  Synthetic primer
gctcctcccttggcaatctt

SEQ ID NO: 194 - DNA, 20 bp, Artificial Sequence
  Synthetic primer
tttacatggtaacgcggcct

SEQ ID NO: 195 - DNA, 22 bp, Artificial Sequence
  Synthetic primer
ggtctggtataatacaccgcgc

SEQ ID NO: 196 - DNA, 22 bp, Artificial Sequence
  Synthetic primer
gcgggaaatcgtgcgtgacatt

SEQ ID NO: 197 - DNA, 24 bp, Artificial Sequence
  Synthetic primer
gatggagttgaaggtagtttcgtg

SEQ ID NO: 198 - DNA, 20 bp, Artificial Sequence
  Synthetic primer
gctacagcttcaccaccaca

SEQ ID NO: 199 - DNA, 20 bp, Artificial Sequence
  Synthetic primer
tctccagggaggaagaggat

SEQ ID NO: 200 - DNA, 17 bp, Artificial Sequence
  Synthetic primer
gctctctggccgtctac

SEQ ID NO: 201 - DNA, 26 bp, Artificial Sequence
  Synthetic primer
gtccagtttttttttttttttggaag

SEQ ID NO: 202 - DNA, 22 bp, Artificial Sequence
  Synthetic primer
cttcggcagcacatatactaaa

SEQ ID NO: 203 - DNA, 20 bp, Artificial Sequence
  Synthetic primer
aaaatatggaacgcttcacg

SEQ ID NO: 204 - DNA, 20 bp, Artificial Sequence
  Synthetic primer
tgctgactgttttccagtgc

SEQ ID NO: 205 - DNA, 20 bp, Artificial Sequence
  Synthetic primer
aaggagccgatgatgatgag

SEQ ID NO: 206 - DNA, 60 bp, Artificial Sequence
  Synthetic primer
gtattgcgtctgtacactcaccgttttggccactgactgacggtgagtgcagacgcaata

SEQ ID NO: 207 - DNA, 20 bp, Artificial Sequence
  Synthetic primer
gtacctcacccgagactcct

SEQ ID NO: 208 - DNA, 20 bp, Artificial Sequence
  Synthetic primer
cggacacttcttccccagac

SEQ ID NO: 209 - DNA, 21 bp, Artificial Sequence
  Synthetic primer
ttggtggagattatcgtggag

SEQ ID NO: 210 - DNA, 21 bp, Artificial Sequence
  Synthetic primer
tcttgcaagctgaggctctta

SEQ ID NO: 211 - DNA, 21 bp, Artificial Sequence
  Synthetic primer
cctatgaggatgtgcatgtga

SEQ ID NO: 212 - DNA, 21 bp, Artificial Sequence
  Synthetic primer
tggggtccagagtgacagata

SEQ ID NO: 213 - DNA, 21 bp, Artificial Sequence
  Synthetic primer
gaattcccaagggctaaagtg

SEQ ID NO: 214 - DNA, 21 bp, Artificial Sequence
  Synthetic primer
tttcacaccatctccacttcc

SEQ ID NO: 215 - DNA, 21 bp, Artificial Sequence
  Synthetic primer
aaggcagccctcaagttaatc

SEQ ID NO: 216 - DNA, 21 bp, Artificial Sequence
  Synthetic primer
aagtctctgatgccagacgaa

SEQ ID NO: 217 - DNA, 21 bp, Artificial Sequence
  Synthetic primer
catggaaaccagacctgagag

SEQ ID NO: 218 - DNA, 21 bp, Artificial Sequence
  Synthetic primer
acgctcacattcaagagcagt

SEQ ID NO: 219 - DNA, 21 bp, Artificial Sequence
  Synthetic primer
cgctagaactccactgattgc

SEQ ID NO: 220 - DNA, 21 bp, Artificial Sequence
  Synthetic primer
taccagctctgtctccaggaa

SEQ ID NO: 221 - DNA, 21 bp, Artificial Sequence
  Synthetic primer
tcaccaagaacaaccagttcc

SEQ ID NO: 222 - DNA, 21 bp, Artificial Sequence
  Synthetic primer
gtgagcttggagaagtcgatg

SEQ ID NO: 223 - DNA, 22 bp, Artificial Sequence
  Synthetic Primer
attgcttcccgtatggctttca

SEQ ID NO: 224 - DNA, 22 bp, Artificial Sequence
  Synthetic primer
tcagcaaacacagtgcacacca

SEQ ID NO: 225 - DNA, 22 bp, Artificial Sequence
  Synthetic primer
gggacccagggagagacguaag

SEQ ID NO: 226 - DNA, 22 bp, Artificial Sequence
  Synthetic primer
ugaagccagcucuggucugggc
